United States Patent Application Publication US 2024/0398875 A1 - sequence listing, part 3

SEQ ID NO: 11 - DNA, 4929777 bp, Rouxiella (residues 3,286,519-4,929,777 of 4,929,777)
ccaactggcgcagcgcattttcaaccactgccgtcgcgctatcctgctcggccgccgcagcaggatattcgagaatgtcccccggctgttcatgttgattagccaaggcgtaagactcgtcgatacagcaggtgacatacacgtccggtttaccgtaacgtgcgatttgactcgctaatttaatcacctgtggcgtttgtgtagaaccgtcgacggcaacgagaatgacatcaaacatacagtcttccttttgtgcgagatgaagaaatgcgccggctatttgccgatgcccagtttgccaatctctccaatcagagcctctttgcagcgcagcacggcctgctgtacgctctcgagcttagcggcatgcctctctgtcggcatcagtaccgagatagaataatgtccaagaatggtgtcgatggcgatggctaaggtggagatcccgagcaccgtttcgccactttccatcgagatgccggtggcgcgcacctgggccactttctgcatcagcgcatcgatatccttgacggtattttccgtcgccggttccagcgtctcaccgaccagctggcgaatttccaggtcgctctttagcgagagcagggcgcggccggccgaggtgctataaatcggcaagtttaagccaaattttggcaccacgcgcagctcgcgttcggcgacgatgtagtgaatgttggcaatttgtctgccgctggcgcgacccagagcgacggtttcctcggtttcattgcaaagctgctgcaggtagggcgaggcgatcgcgaccacgtcggtatggatagtggaaaccagacgcagcagcatcgggcctaatcttacgccacctgcaccctcggtgcgcacgatcccttcttcacccaaagcggcaacaatgcgctgtaccgtcgagcgtggcagctggacctcattggcgatagccccgaggctgagtccttcggggtgacttcccaatgcgttaagaatggccgccgcgcgcgagatgacctgtattccgccgctgcgctcttcctcgaccgagtattcagtattcatagcattgatttatccatgattatttccttccttatcttattaacacccgcccaatgtaatgtcaggcggtgcgaaaaacaatcacccaccacattgcaatacactgcaccgtattatagtatcggctcggtgtaccgtatagcggtgcattgcatcattataataagagcacatttatgattcagcaaacgacccaggtcagccctgccatacctgctccgcctcccccgcagccttttacgcttaggctggtgattgggttgatcggtattctcatcgcctcacttttttcaggcctcaacgatcgcgtgtcagacattgcgctggccgacgtgcgcggtgcgcttaatatcagcagcgatcccggatcctgggcgatcggtgcctatcaggccgccgaagtcgccgccatgatgctggcaccctggttcgcgatgaccttctcgctgcgccgttttgccatcggcgtcgcgatcggtttttcgctggtggccgccgtactgccgtactcgccgaatatctcggtgtttattgccttacgcatcgtgcagggcatctttggcggcgcgcttccgccgctgctgatgaccgccgcactgcgttttctgcctccgggcatcaaattatatggcctcagcgcctatgccttgaccgcaacctttgggccgaatatcgcgacaacgctggcggcatattggaccgacgtggtcggttggcagtgggtgttctggcaggtgatcccgccgtgtcttcttgctgcgagcatggtgagctacggtattccgcaggatccctcccgcttcgaacgcttcaaacagatggacgtggtcggcatgctcacgggcagcagcggtatcgcgctgctggtactggtcttacagcagggcgagcggctcgactggctgagttcgccgctgattgtggtgatgctgctgtcttcggtcggcctgcttagcgtatttttcgtcaatgaatggtcgcatccgctgccgctgtttaaactgcagatgctaaagaggcacaacctcagccacggtttgttgaccctcggcgggctgatgacgttggtgctttccggttcggcgttaccctcaagctatatggaaagcgtgcagggatttcgcgccgttcaggttggcccgctgtcgttgaccattggcctgccgcagctactgttagcgccgctcgtagcaacggtgctgaatttccgctggatagacagccgctatatcttactcggcggtctcggtcttatcggcgtctcctgctacggcggcagtcatctcaccgaaagctgggccagagagaatttctattggctgcaaatcatgcaggctttcggccagccgatggccatcttgccggtactgatgggcgcgaccggcgtggtgcagccgcctgaagggccttttgcatcggcgatgtttaataccgttcgcgggctgggtagcgttctcggcacggcagtggtcggggaattttccagccagcgtgaacagttccactccaacgtattgctcaatcacgcgggcagcgtcagtgcgctactttctcagccttacgacggcgatggcacctatctcgccccgctgaatcccgagggttcagcggtatcgacagaagcactcagcgccttttcatcgctggttaaaagacaggccacggtgttagggctgtccgacagctatttgatgattatcggcgtcgcgatcgcactggctttgctgacggttctactgcccaaacgcgcctacccgccgcagtcgctggtgaaaaaagccgattgagccacgccggtttcctgacacagactattaataagaacaatcgagagaacagtattatgtccaagacatcctcatttcgtcccatctggctggccgttgccgtcattatcctcctgcttttcattgtgggctggcatctgcttgcgggcgaaacctcgccaacgaccgatgacgcggtgatttctgccgactctacgctagtcgcgccgcgtatttccggcaccattcaggatgttctggtcgaagataaccagcaggtcaaggccgggcagctgctggctaaaatcgatgaccgcgactacgtaaatgcggtacaaaccgcccaggcctcactcgaaaccgcacaggcacaaatgcagagtctggtggcgcagactgccaaacagcgaccaactatcgaccaggcgcgcgccgtggtagctgccgatgcggcaggactggtttatgcccgtcaaagcgccgaacgctacaagcgtctgtcgcttaacggctcaacctcgctggaccaacgtgatgattccgatgcgaattatcgtcaaaagctggcatcgcagcagagtgatgttgccgccgtgcaggccgcagagaagcagctcgaggtgttgaaagccgagcaggccgaagccagcgccgccatcgactctgcaaccaccgcgcttcagcaggcgaagttgaacctgtcttataccgaaatcaaagcgccgattgatggtcaagtgggtgtgcgttcactgcgtgtcggagcttacgttagcgcgggaacgcgtgtactggcgctggtgccggtcgataaggcttacgttgtggcaaactatctcgaaacgcagctggcacatgtgcagccgcatcaggcggtcagtatcaaggttgatgctttacctggcgtgacgctgagggcagggtggacagcattgcgccagcgactggcgtgaccttctcgccgatcacgccagataacgccaccggtaactacaccaaggtgacgcagcgactggcggtgaagattttactggaaaaaaatcagaaggatttatcacgtttgagggtggggatgtcggtcgtaccgacgattgatactgaaagccattaatacatttatcgccctaatttcctctgcgtgacggttcaaccggtcacgtcacgcagaggcctacgacttatcctacctagttctgctgctggcggctgttcgctgccggagcctcattttcttctttcttcataaactgccatttacctgagaacaggaagcgcagcagagggatgcgtttatgcacctcataaaggaagaaggcaataccgaaaacaaacaccagacccagccagaaaccgacccagtcgcttttgatcagtggcgtaataaaggcgccgtaaatcaaggtcaacgggtggtgaatcaggtaaacaaacagcgacgcattcaccagataggtcacaaacggcgactggaagttcagcacatagtggctgaacgagaacaccacgttcaccatcaggatacccagcaggctggtgatgatcgcgtccagctccatcgagtacagctcaggcgtattgacgtgctggtttatcatgtaggccgcaaacaacaggatacaaatgatacaacccggcaccgatggcttcaggaacatgctcttcagattggcgaatttataggtacaggcaccaataaagaagaacggcagataaaacaaagtctgcatgacaataaaattaaatgcaccattacccaacagctgtggagcaaaaagatacagggtgcggttaaatgcagcgtaaattaatccgaaaaataaaaataatattgagatttttccgagcgaatctgcatcgcgaataatatttaaaatccgacttttcttattttcttttaatgcacggaataaatagaaagaaatactggttaatataaccagcgtcaataggaaccataaatgcgagacaagttcccagacggtaatattgagtttctggtagaagtccatcgaactccagttggagaacttgtcggtaaaattggccaggaagaacagctgcgggatggtgatcagcgggaaggccgccaccagcgggattgccacacgctcaagccggacttttagccacttctgacgctcgtagcgttcgtacagcatgtacgagaaatagcctgaaatgacaaagaaaacctgcatacggaaggcatggatagtatcgttgaatattgtcagaccatcggacggcgtcacgctatttaccgcccagatatggctggaataaatcaacgatatatggaatggaataccgagcaacatgaggtaggctcggatcgagtccaaaaagaactctcttggttgagtttgtggtttcatagagatccattttagcaaattttcctaccttccactgccaaaattcccatcggatttctctcggataagaactgtctgctttttgtaaagcgacaagagcagcgggccgcaaccctactatagactcagacaactttccatagcgggactttctccgaattgatatccttgtatcgctatgtgcttaaacggttcatcaatgtgatgaacacatcaccctcatgttgtcggatttccgactattccttaaaatggactaatgagttgagcacatttaaaggaggggacgtgccgggtaaaaatttttccaaagggccagatatgactaaagtccgtttgcttagtgccgctgtgttgatgaccttgttcacttcatccgcatgggctttttcaattgatgatgttgccaagcaagctaaagcgctcgctgataaaggttacgaagcaccaaaaagtaatctgccatctcaattccgcgacatgaaatttgcggactaccaacaaatacaattcaatcacgacaaagcgtattggaataatctgaacacgcctttcaagcttgagttttatcaccagggaatgtacttcgacacaccggttaaaattaatgaagtgaccgcgaacagtgtcaaagagatcaaatacagcccagactactttaatttcggtaacgtaaaacacgatgccgactccgtcaaaaacctcggtttcgccggtttcaaagttctttatccgatcaataaagcagataaagatgatgaaattatgagcgtgctgggggcgagctacttccgtctgatcggcaaaggtcaggtttatggcctgtccgcgcgcggtttggctatcgatactgcgctttcttcaggcgaagagttcccgcgtttccgcgaattctggattgaacgtcctaatcctgacgagaagcatctgatcatttatgcgctgctcgattcaccgcgcgccaccggagcctaccgtctcgacgtttatccaggcaaagaagccagcgtagacgtgcaggcgaaagtttacctgcgtgacaaagtgggcaaactgggactggcgccactgaccagcatgttcctgtttgggccaaaccagccttcaacggtcatgaactaccgtcctgctctgcatgactcagacggtctgtctatccacgccggtaacggtgagtggatctggcgtccgctgaataatcctaagcacctgtcggttagccagttcaccatggaaaacccgaaaggtttcggtctgctacagcgtggccgtaatttccatcaatacgaagatctcgacgatcgctacgacctgcgtccaagcgcctgggtagagccgaaaggcgactggggtaaaggcaaggttgagctggtcgagatcccgacagccgacgaaaccaatgacaacatcgttgccttctggacgccggatcagctgccggcaaccggaacgccaatcgatatcagctatcgtctgcacttcacgcgtgatgaagacaagctgcactcacctgactcctcatgggtttctcagaccctgcgttcagccggtgacgtgaagcagtctaatctggtgcgtgagcaagacggcagcatcgcttacattgttgatttcgttggtcctgcgcttaagtctcttaaaccggataccccggttgcgtctcaggtcagcatgggcgacaacgccgatctgcttgagaactctgtccgctataattcagtcaccaaaggatggcgtttaacgctgcgcctgaaagtgaaggatcctaagaagcccgttgaaatgcgcgctgctttggtcaatggcgacaaaacgttgagcgaaacctggagcaatcagttacctgccaatgaataaaaaaacgcattctatccaagagtacgtagaggcattgcccctgactgagactcagaaagggaatcttactcagcagcttccggctgctgaggacgtagccttcacgtctctgcatcaccgtctgggcggtgatacttcgacgtcaaacgacgtggttgacccacaggctccgctgatttcggtaaaggcacgtgtcgctgacgcctggcctgacgccgaggagcacggcacattatctgccaaagataatgaaggtcgcgacgtggtgaaagccatgccaccggtcaagcgttccagcatgttccctgagatttggcgtaccaacccggtaggccgtttctgggattcactgatgggccgtaccgccattgcgcgccgctacacctcttctcaaatgcccgagtctgagaagagatggcgtgccgctggctctattcgtcgctatatcctgctggcactgatgctggtgcaaaccgccattgccacctggtatatgaaaaccattctgccttatcagggctgggcgctgatcgacccttccgacatgctgaatcaggatctgctgcaatcggtgctgcagctgctgccttacgtgttgcagacagggatcctggtgctgtttgccatcctgttctgttgggtctcggccggtttctggactgcgctaatgggcttcctgcagctgatgattgggcgcgataaatacagtattaccgcctcaaccaccggcaacgagccgctgaacccgaaaaatcgtaccgcgcttatcatgccgatttgtaatgaagacgttgagcgggtgtttgccggtttgcgtgcgacctacgaatctgtcaaagccaccggcgatctggatcagttcgatatctacgtattgagcgacagctacgatccggatatctgcgtggcggagcaaaaggcctggatggaagtgtgccgcgacgtagacggtcatggtcgtattttctatcgccgccgccgccgtcgcgtgaagcgtaaaagcggcaacatcgatgactggtgtcgccgttggggtggggaatatgcctatatggttattctcgacgccgacagcgtgatgagcggtgagtgcctcaccggtctggcgcgcttgatggacgccaacccgaacgccggtatcatccagtctgcgccaaaagcgtcgggtatggatacgctgtatgcgcgctgccagcagtttgcgactcgcgtttatggtccgctgttcaccgccggtctgcacttctggcagttgggtgagtcccactactggggccacaacgcgattatccgcgtcaagccgttcattgagcactgtgcgctggcaccgctgccgggcgagggctcttttgccggttcgattctgtcgcacgacttcgtagaagctgcgttgatgcgtcgtgctggctggggcgtgtggattgcctatgatctgccgggaagctacgaagagctgccgccgaacctgctcgacgagttgaaacgcgaccgtcgctggtgtcacggtaacctgatgaacttccgtctgttcctggttaagggcatgcaccctgttcaccgtgccgtgttcctgaccggtgttatgtcttatctgtcggcaccgctgtggtttatgttcctggcgctttcaacggccctacaggtggtgcatacgctgatggaaccgcagtacttcctacagccgcggcagctgttcccagtgtggccgcagtggcgtcctgagctggcgattgcgctgttctcaacgaccatggtgctgctgttcctgcctaagcttcttagcgtggtgctgatttgggccaaaggcgcgaaacagtacggcggtgggctgcgcctgctggtgtcgatgctgctggagatgctgttctccgtgctgcttgcgccggtacgtatgctgttccacaccgtgttcgtggtcagcgcgttcctcggttgggaagtggtatggaactctccgcagcgtgacgatgacgataccccttggggtgaagcgttccgccgtcacggttcacagctggcacttggcgtggtctgggccagcggtatggcatggcttgacctgcgtttcctgtggtggttggcgccaatcgtcttctcactgatcctctcgccgatcgtttctgtgctttctagccgtgcgacgctggggatgaagagcaaggcggcgaaactgttcctgatcccggaagagtacgacccgccgcgtgagctggtagcaacggaagagtatctgaagctgaaccgcgaacgtatgctgaaaaacggctttatgcacgccgtgtttaacccgaccttcaacgcattggcaaccggtatggcgacttctcgtcacctgctgcgccagtcgattgaaaatggtcgtcagcaaatgcttgagaaagccctgcaaagcggtccgaagaatcttggtaaggccgatcgcctgatgctgctaagcgacccggttatcctggcgcgtctgcattcggcggtgtggaccaacccagacttgcacgagtggaaagcgtattacgctgagctgccgcgcaacgttcaggccttccctgagacgcaaactctggaagcaaaaacggcgtaaccgtctgagaaaataaataaaaagggcagcccgcaggctgcccttttttatgttcgcgatttactgtgccgcagcaacgtctttaacggcgctcagcttctcgacggtggtgtgataggtatcctcgtcaagcttaggcagtccgtcgaacaccactttgcctcgatagaggtcacggtcggcctcgacaatgtggggtttggtgttcaggctaccggttgccacgcagacgttattcaccttttgcaggcttgggtcccagatattgcccatcttgctacagctatcgacccacacgaatttctcgttaggatccagctgtgagagctgtttctcaagcgagtctgacaggtaaacgtcaaacatcgggtcgattctgccgtcattcacccgcaaaatcagcgggaatttgaacgatacgcccgagaaggtcagcattttgctgtcggtattcaacgcgaagtcgctaatggttttcgggaagtcccacattttgatgatagcctgcttccagcgcagagtatgcttgcggatgtcgcggtagttgttggccagcgactcactcgacaggctgctgcggcccaacccgataaagttactgccgccaagcacgtcgagcaccgtagcgccgttgtccatagtggttctcttctggtcgatgacctgattattttcaccggtgccacgcagaataaagaacaggtctcgtcggtcctgcctggtgagaatcgagtaggcggtattgttcattgccagatggtcagacgacaccacgatgaccgtattcttgaaatacggtgacgctttgattttgttaatcagcttcgcgacctgctcctgactacaggcaacggcgcttaatgactgattgcgcttattattatacaaatagtcctttctattacaggttgcatcgatatagccgtcagggtggtgagtatcgacggttaatgcaaacagcgagaaaggtttgccctctttagacagttcgacaaacttgttgtaaacgaagtcgagcgtggtgtcgtcataccagccccactcatttttatagttgggatctttgacgtaaggcttcagttcttcgtaaccatagaggtggtcaataccgtgggatgagagcagaagctctttaccggcgaaggccagattggcgccctgatagaaatagtttgtgtagcccgaagcttttaacacgtcaccaagacagatgctgcgtggataaaaagttgaaagcgagcttgaagcattgttgtcaaaaggcgcgaagaggggatcccacacagtgccgaaaccatgccggaaatcgtgttttctgcaccagggatctgaatagtattactgaaatctatcgattctttcttgatagcacccagttccggcaccagatccgggaaaacattgttatcaaaataggtgcgttccagactctcaccaaagatgtagaccaggttcggtttgctgccgttaatcgtcttgttggcgtcgcggtaattatcggcaaagtccgatttatcatcaccatactgtgttgaggtcaggcgataaagttgagccgtggcgggggcggtagcaatggccagcagcgacagaaagagtgccgcaaagttatagctaatttttctgttggtgttcttgttacgtaaaatcagccaggacagcagggcaaaaatcagcaaaataaaggcgaaaagcccgagtgcaggcagcacatattttccgacgccgacaccggttaggctactggtgatagtaaagatcacctcgtcgttaacaccttcaccggtaaagtaattactggcaatccaaatggcactcagcagcaggaagagcgccgagagcaacagcgtgagagtaatccaaaatgagtttcgtttcgccttgagcatgcaaacgataaccgaggcgataaaaaacaaaacagaaatgaattctagtgccatgcactttccttgtatgaccagtgaccaataattgcgtaaccttatgataataatcagtaagttttcgccatcttattttgtgcgcataaaaccctgcgggtaatcataatataaacacaataaacaattcatatacgtgatgattacacagcattttatagcgtttgatgcggttaagtgagagtaaggaaaaggcctattttacgttagcttaacgcggttgaccggggaggctgtggtaaactttaccgctgaaagggcttaaaaggggtgggttcggcgtgaataaaggtttactcgtaagaacggcagtggtgggtatcgcaatggcaaccctctcgggctgcggcagtattattagccgcacggtgccgggacagggccatgaaaatcagtattaccctggggtacagtgggacctgagagacgggccgtggcgttacgttactgtcatcgatgtgccgctttcaatgatagtcgacacttttatgctgcccattgatgcccgccacggtccctacaagtaagcatcaggctgtctgcgcctgagacatcactccgaaaaagaattagtcttcgcgtcccgggaactcgtcttcgtcatcccattcttcggctgcggcggcaccctcttccgtgtctagcggaggctcaagcagatattcaccttcatcccactcgtacagcgtattttcgtcctgccactcttctagcaactcttgcttgtcgaagtcgtcatcaaaaatcgcctgcgccgcctcaccgctcagaaagctcaggccttcggtttcctcgccttcctctgcggaaaactcggcctcccacatggcgtctccgtcctgcatgatgtatttctgcagagtaaactggctgacggaaggtgactcatcatctgatgaggtttcagcgattttctccagaaactcttcgcgtgctgcatctacagcctcttccagcgttgcatacagtgacatatttcctcctttgcccagattgcggtggttttaggaaaggatagttgaagattcagcagggaaagggctttggatgtaaaaaagtttaaatttgaaaactctgggtgcagcatgttgaattacttggttaagatgtgggcaacaatcgctttttgcaccggcagtagccacgatttctgttcataaccggcaaagcgaggatagcctaaaggatcgaaatccagctcctggccgagggtaaagggtggggtaggcagcagcagcggggtgcccatgctttgcaggtgtgaggtcgtaagagacgtcggtcgcccgctgtctttcggccagccgtcagtgataaccacgtcggcggtcaccttagccaggtcagtgaaatttacgccgggagtgccatcgtgaagttctttcccgcaaacgtgagtgacctgaagacccatcagcacagcaagctgatgccagctgcgaaaaacgttggtcgttgggcccataggcaaatatgcaggtcctggatagcgccgagggttttgtttatccaataggcatcggtcaacacctcacaaggatgccccagactggacatagcattgataacgggcctggatgacttctcggcaaactgggcaagccgctgatgattagattcacgtatcacataaatgtcgtaaaaggcgtcaagatacccggccaaatcctcaaccctttcgccggtttttagcaaattcggcagctcgatataagcgatgccgagttctttaaaggcctgaataaaggtggttcgcgttctgataccgtttccttcaaatgaccaggctgcccgcttggttagcgctgccatcgggctttcggtaagcgcccaaatggcatgaacatcggcaggctgtaggtcgttaagggaaataaggttcacgggttatttcctgttctggctcatcttgtagctcaggctttttttcaccgtcggccattcgctgtcgatgatggagaaaataaccgtatcgcggtagcttccgtcggcgtcttgctgcatgttacgcagtacgccgtcctgtttggcgccaagacgggcgatagcggctctggaagtctggttatgccagtgcgttctaaattcgactgcgatagctttcagctcttcaaaagcgtgcttaagcagaagatatttgcattcggtgttcaccgctgttttttgcacgctcttcgcataccaggtaaaaccaatctcaacgcgacggtgttgaacatcggcccggcagaagcgcgtggtaccaactatctgccgcgtggcgttgagcaccaccgcaaatggcagagagacgctcgcccgttgctcattcagtgcagtggtaatataggcgtcgatccgctcttcattagggacagaggtataccatagattccacagttcaccgtcggcggcagccttcaatagatcttgcgcgtgttcggcacgcagtgggattaaggtgaccgtatcgccgcgcagggtgatttcatgcaacccattttcagtagccataatcctttatttttcctttaattagacctttcctataccctatatcccaaagagggttttgccaattgattttagggagaataatggcgaatttatcgtcgtaattgtcaacgcaaattcagctttgcaaagggcatggtgcggtagggtaaaggtttagcaaacagggtttcttcgccgattttcttggctcaaagtaagcgggaactccatagaaaaggccattgctatgaaaatttctacccgcactctcttacttccactttgtggtatcgccgcgttaatcagcgttggcagtcaggctgccgagtcaactgataaagcccctcagggcgcgccgatgactcaacctcaggacgaaccgccattccacggtgaaggtatgccacacttcccgccgatgggaatgatgatgccgcctccgccaatgcacggattctgccacggcggtgaactgttctgtgcgtccgttgccagcgataacccgactgacacgctgcagaagctgaacggcgttattccggccgcgaccgcaggcaaacactatgaagtgcgtgtttccgtggttgaagttcctgacttcccgcgtcacgagcatggtccacgcgacccgcagagcaataacggaaaataaccggcattgattcagcgccgtttcgcaaagggaaaggcggtttattcgaccgttgcctgactcgggcggcgctgtaaactccagtatgagtaacaggcattaaacaacaccacgcaggccgtcacgcagaatactgcgcggaaaccatagcctgccgacaccgatgcgcccagcaagggtcccgtcacattccctacgtcacgaaacgactggttatagctaaatacgcgtcctgccacctggttggtacagttatagataagcagtgtttgcacggcgggaagcagcgcaccatcacaggcgcccagtaaaaatctgagaatgcccagttgcagtggattatgcacaaacgccataggaatcagcagcagcacagacatcgccagcatggcgaccagtatcctttccggaccaattctgtcacccaacttacccagtctgggcgcgcttatcagtgccgccacgcccggtacggaagcaatcatgccgctgatgaatgccagattctgggtattgcctgcgagttctcgcacgtagagcgtcaaaattggggcgatggagccggtggcaatctgaataatcatggtggtaataaacaggcacagcaccagtttgggatcttttagcgaagcaaagacctgctttctgttgagcatgtctttcttgttgatcggcacaaactgttcgcgaatcatatacagcgtcatgaggaagcagacaaacagcacgctggcggtaataaagaacaccgggcgcagtccgtaggtgtcagcaaggattccgccgaccagcgggccaatcagtgcgccactcaccgcgcctgtcgatagcgtacccagcgcccagccgcttttattgcgtgggatctgagtggcaattaaggcattcgcgttaggcacaaagccgccaagcagaccaagcagtgcacgcagtaccagaaactgccagatattttgcgccattcccatcagcaccatcacgatagccataccgagggcagaacgcagcagcatgatttttcggcctttgcggtcggctaatccgccccagaaggggaggcaatggcagaaaacaggaaggtgatgctaaacaccaggcctgaccacatgttgagagactcatggccggtaacgccgagtgtttctatataaaggggaaggaagggcatgataaggctgaatgccgcaccggtaagaaaacagccgatccaggcaacgaacagattgcgtttccaattaatgggttctggtgctttatccgatgcaggtgccgaagtcataaattaccaatgagtgaggtccatttactctgtgaagagggcaaaacagagcgcaacaataatgaattagctcgataattatgcgccgaattattacccacttcaatcatgttgcagacttattacgaaaaattaaataagaacgtagaaaggaattaaccgcagcacaagcgttgaaaggtagggacaaattgcggagaaaatagccgggcggcgggagtatgccgcccaacttttaaggttctgattaacgcagagcggggttgctgaccacggaataacgaccgctgccgaggaacataatcaccagaccgccgaagaaatacattgcttcaccttccaggccccatgcacccacctccgtcacggtaaagaacttaccacccaccacgagcagaacggcaataaccagattgaaagacatcaccagcgctgcgggacgggtgaaaatgcccaaaatgatcaggacgggcgcaatcacttcaccgatgtaggcaccgtaggcaatgaagcccggcagaccgtgcgcttcaagcattttggcaatccagcctacgccattttccatctttgccacgccgtggaacagaataaggatgccaaaagtaagtctcaacaatagcttaccaaaatcagggtgatcggtaacgcgagtaaaagaagcgtttaatttagccaacatagcaatgtccttaagataattaacgtagtggttagccgtgaagaaagcgtagggaattaatcacggttggaaattatgcttaagtattcgctgaattacggcacgaggaaatcagataagattgatggagtctttcaaaaaaactgtttaaacaaatcaggttggttgaagaggtttgctctctggcatcaagagtgatgccagagagtggagatagattatgaaaattaattaatacagtgaaggctcgccttcggggcgcgtcttgaagcgacggtgcagccacatgtactgctctggcgcgagttttatctcgtgttccacgactttattcatgtaggttgctgcgacaacttcgtcctccagtgggaagttttccaccgctggatgcagcagcagctcgtagccttttccacccggcaaacgacgcggagtgaaagggataatcgccggtttacccatgcgggccaacagataggtgcctgtcgtggttgccgctttgtccaccgcgaagaatggcacaaacacgctggcgcgcggaccatagtcgtggtcaggcgcataccagatgatgtcgccctgcttcaggctacgaatcattcctttcagatctttgcgatccagcatcgctttgttggagcgcatgcggcccttggtttgtacccaatccatcagcttgttgtcgtgcggacgataaacgccgatgccggggttatggatcccgaagatgcgtgcgccaagctcaagtgtcaggaagtgtacgccgataagcagtacgccctgctggttatcacgggccttttggatgtgctcaagcccgctgaccttaaaccagcgctcgatgcgccagtccggccagaaccaggccatgccggtctcaaacaggcccatacccacggattcgaagtttttcaccaccagttggtcgcgctggctttgcggcatatcagggaagcacaactcgaggttgcgctgggcgatacagctgcggcgttttacaaaacgcatcgaaaaacggccaatcccacatcccattttataaatcagtggataaggcaaaagtaccagtaaatacaacagtcccagaccaatccaggtaggccagtaacggggatgcaacaacgaacggttaaaggtgggtacctgagtcataaaatctctgcgtcatagttttgaagtaggaaaatataagctctgtccagacggtatcaggtaataggaatcccagagattctacgacctaataacgggatacagtctgctagccgctagttaaggaaatcgcctgcttaagtaaattggcatgattacaggggataaaatttcctaaacaaagtcgtttattgtgacactttttttaaccaaggtgaaaaaagacggcattaaaacctcatttatgaaggattaagccctgatatctccttaaaacgtctgaattttatgcttgaagtcttaattttttctgaacagcagatgatttagtcgcattaaacaaatggggtttagctcgctgatactagcgaattgaatattgatagagaacccgactttgtcaattctgttggcatgttaaccagtaataaaagtgtaacagggcagatttagcgaagggagagacgccatcgtgactaaaagggacgccatcgcgatggcgtccctcgattaaccaaaatcttatttggcgttgaacagacccttaacgctgtgaggttcgctgcgccagtactgtttaggcgcgcttaccttggccccagtttggccgccgcatgccaaggccaacgtgggtcatagaggatcccacgtgccagagctatcatgtctgcctgaccggtgccgataatcgcttctgcctgttcggcttcggtgattaaaccgacggcgatcaccgggatattgacggccttcttgatgctttctgcgaaaggcacctgatagttcggacccaccggaatcttctgctgggttgacagcccaccgctggaaacgtggatgtaggcgcagcccagtttttctaacgcttttgccagctcgatagactgctcgatgtcccaaccgccctcaacccagtcgctggcagaaatacgcacgccaatcggtttgtcattggagaagaccttacgcacttcctgatagatttccagcagcagacgtacgcggttttccagagaaccccgtattggtcggtgcgtttgttggaaagcggtgagaggaactggtgcagcagataaccgtgcgcgccgtgcagttcaataaggtcaaagcccagcttattcgcgcgtttggcgctctcgacgaaggcctttttgaactgctcgattctttccagtgacatcgcttctggggcagcgtcgctctcggcgaagcctactgcagaaggggcaacagtctgccagccgcccagcttggcgctgatttgatttccgccttcccatggcgcgtagcaggaagctttgcgcccggcgtggccgagctgaatacccagcggcatatcgctgttgtctcgcaaagaggtcaccaggctcgtcagcgcctcttcagtttcatcgttccacaggccaagatcctggggagagatacggcccacggcctcaacggcagtggcttcgagaataagcaggcccgcgccggaaaacgaaagttgaccgagatgggcgtgatgccacgaggtggccttaccgtgttctgctgaatactggcacataggggcaatgacgatgcggttttccagcgtcagtgaacccagcgtgatgctctcaaatagcttgctcatagttgcctcgagtaagattaggttaatgtagtatgcgcgaaaccggcgttaaccgaagctttaatcctgatagctgtttcatgtatgatagcgcggttttatttttactctgcttagaatagcctcaacgaaagacaggaaagtacaccatgccagtgttacataaccgaatttctaacgaggaactgaaggcgcgcatgctggctgaaaccgagccgcgtaccacagtttctttttataaatacttccatctcgatgatcctaaagcatttcgcgatcggctctaccttgaactggttaaattaaatgtttttggccgcatttatgtggctaaagaaggcatcaatgcgcagataagcgttccacaaagccagtttgaagcttttaaacagcatttgtttgagtgtcatcccgcgttcaacaatattcgtctgaatatcgcgcttgaagacgacggtaaatcattctgggtactgcgtttcaaagtgcgtgagcgcattgtggccgacggtattgatgatgaaacctttgacccttccaacgtgggtgaatacctcaaggcggaacaggtcaacgcgatgattgacgatcccgacaccctgtttgtcgacatgcgtaaccactacgaatacgaagtgggtcactttgacaacgcgatcgaaattccttccgataccttccgcgatcagctgccaatggccgtcgatatgctgaaggaagataaagaaaagaaaattgttatgtattgtaccggcggtatccgctgtgaaaaggccagcgcctatatgctgcataacggttttaaaaatgtttatcacgtcgaaggcgggattatcgaatacgcgcgccgtgcgaaagagcagggcttgccggtgaagttcaaaggcaaaaacttcgtcttcgatgagcgcatgggcgaacgcatctccgatgacgtgattgccaactgccatcagtgcggtgctgaatgtgacaatcacaccaattgcctgaatgacggctgtcatttgctgttcatccaatgcccggcctgcgccgctaagtttgacggttgctgtagcgaaatctgccaaactgagctcaagctgccgcctgagcagcagcgcgcactgcgtgccggtcgtgagaatggcaacaaaatcttcaataaatccaaaggattattgcagactaccatgcacattcccgaaccaaaggactcagcctctcaagagtgattaacgaggtttgaccttaagcctgctggccttgtgccgcaggcttagcctttctgatatatccccttatcatcttcctgatgtccacgctattagctccattttaatacctgcgttgttgcttatcttttgccaacaatcatcgctgacataagcgaaattttctcctcatcaaacctatcgaggtagtgtttttatctgccgaaaaaatcagggaaatgtcatttttttgtcaggatgaattttttttaagacctgaattttgctgttctatacttgactgtaagtaaagcataaattgacataagcgtgtgcagacattgtttttattgtttatttatatcagtgagttattgatatttgttttgtattttcatcctgggtttacaccccaatcacatgtcggtatatacagtaaacttgaccaagaacaaaatcttgtataggttaaagataagtaaataagcgttttattattaatagtggcacgaattttaatgccgtaaatggcataaaaaaaagtgaataataaacgcagctgcatagctctcgcatcatgtttgttcattaggaatgagcagaccaatctaccagggaagcgaaagctatggtgctgcactgataataatttaggcaacatctgaggtaattttatgaaagattcaacagaatctcatacttcgcacatcaaattctggcgtaagcgcaacaagcccgagctgacgctcgacgatatcaccattgtagacagaaaaatgctgaaccgcgcagtgggcgctgcggcattaggtaacgccatggagtggttcgacttcgggtgtacagcttccttgcggtgaccattgggcacgtcttctttccaagcggcagtgcatcggcacagcttatcgcgaccttcgcgaccttcgccgcggccttcctggttcgtcctttgggcggcatggtgtttggtccgctgggcgacaaaatcggtcgtcagaaggtactggcctttaccatgatcatgatggcggccggtacttttagtatcggcctgataccgggttattcaagtatcggtatcgctgcacctatattgctgcttgtggcacgactggtgcagggattctcgaccggtggtgagtatggcggcgctgcgaccttcattgctgaatattcaacggataaacgccgtggctttatgggcagctggctggagttcggtaccttcgggggtatctgctggggcgggtctggtgactggtctgacggcctatatgtctaacgatcagctgcttgcctggggctggcgcatcccgttcttcatcgccgcgccgttaggtctgtttggtctgtatattcgtttgaaacttgaagagacccctgcgttccagaaacacatggagaagcaggaagagatcgagcacaacaaacctcaacaaacactgttcgagatgctgcgtaaatactggcgtccgatgcttcagtgtattggtctggtgctgctgttcaacgtgtcaaactacatgctgacctcttatatgccgagctatctgactagcgtactgggtctgagcgagttgagcggcctgatgcttatcatggtggtaatgtttatcatgatgccactgacgctggttctgggtttctggaatgaccgtctgggtcgtaaacctgtgctgctggccggtgccattggtttgattgttctgtctattccttcgctgatgttgattggtcatggcggaatggtgggtgtgttctgtggtctgatgctcctgggtattctgcataccttcttctcaggcaccatgcctgcggcgttgccagcactgtttaccaccaacacgcgttacagcgcattggcaatcggctttaacatttcggtttcactgtttggtggtacgacaccgctggtgacctcatggttggtatcagaaaccggcaatgttatggttcctgcttactatctgatgggtgcggcgttgattggcgctattaccgtgttctcgttgaaagagacggcgcgtaagcctctgattggttcggcacccgcggttgaaactaaagaagaagcgaaaaagctacttaagaaactgcatttgcgtaaaaagaaacgtgaagaagaaaaggcaaacctgggaaataataccccaacgtcataatcatctggcgaacacaataagttagatgaaatttaataagaggctaccgacaaggtggcctctttttttctgcataaaaatgtgtttcgttaagaatatataaataactggactgccggtcttcttaatattcaacgcatcagtgtcataatatcggctttaatttttcggcttaatgggcgcagcgcaaggggttcattggccagtggaaatatttgatgagattatatacgaagcaaaattcaagacgatttctgaccttaatcttttgcgtgatgtggcgtttgtggacatacaccgttctgtcgctgatattgagttttctggctatccgatagttgggcatctctgccatccagtcgccgatcaccaggacttcctgatcgctgaagatggagaaaggctgtgtacacagcgtggcggggtctttgacaaagtatgagagataattttgttcagtatggcattaacctgatgttttcgaaggatcaggaagttttcggcaatcatgatgggttcatcgtgatcggggtaattggcatccagatagcaatagatcttgctcgttacccttagtctcaggaaattgctgaccacgctgtcggtttccgtacagtggcagtggctggtcatattcaccaatattatatttggcttaatcttctcggcctgaattaatccctcttcaatattttcaacgccagtgacgttaatatctttatggtccgcgagaacagaaagcatcccgaggcgcataaagccgcagggttctataatcaatattttcatcaataacatccttgtttttattctttaaataaatataacgaccactccatgtgatcctgagcgctgaggatatgtttttataatagccgctgtcaaatttgcgaataaaaaagagacagattattgacgaaggatatgagtatcttaatttgtattgattggggaattacttcataaagaaatgctgaagcttggagacattattcgccgacgttctcttcggcgaataattcgtctgtagtgaataattatttaaaacgtgacagggagaacggcgtgagatcggctttaggcgcgagaccttgagcaaacaacgatacggtttcacccaacgcgctggcaaatttgaagccgtggccgctgagtccggaaattaccaacgtattgtcgtgtcccggcacgttatcaatgatgaaatcttcgtcgacagtgacatcataggtgcatgatgcgccataaaggcagacgccgacacccggtaagaattgacgcaggaaaccaaagacttccggaccgtcttctgcgaccgcaccaaacggcgtgcgttgcttgggtgagtcgataggctgaccgccgttgtgcttgccgagtttcaggctgtctttaaccgccgggaagccgtaaaactgatcgccggcctcggtttccacagtaaacgccggaaagttgttctcttcactgtagcgcccgtcggcctgatgccaggcgaaaactttacgcattggcgtcatcggcaggtctggcagcagtttttttacccaggttcctgcggtcaatgccagcttacgcgcccggtattcaccgtcgagggtgctgacgatagccatatcaccttcgtagcgaatactgtctaccgggcagttaaacagctgggcacatccggcatctcgcgctagcttgatgtaaccttcgatagctttctcacagtaaaggtagccggaatcaggttcgaaaacgccgctataaccttcaggaacgttgagctgcggccatttatggcggatctgttcagcgctcagagactgtgtattaaggttgaactctactgcgctggctttcacgttggcaataaattctgaaccctgcggaccaatgttgatcacgccacaggaacgaaaaatctcttcgccggtcagcattgcgagttcgttccacagtgcctgtgcacgaagcacaaggggaacatagcgggcaccttcgccataggcgtgacgaataattcgcgtttcgccgtggtggctaccttctttatgcggcggcatggcgctgtcgatcatcagtactttcagcccggcgcgcgttgcataaaaacctgcggcagcgcccactgaaccactgccaaccacaattaagtcataatccatcagacgacggttcctcgacaaaaaattaaatagggacagggcatgatagtgagttttgctagcggatggcaaggcagaagcaggcattaaaaaaggcaccgcgagagagctcgcaggtgccttagactaaggtgtgaagattaatgtttacgttgatcaatgtactcatactcgtgcgattcgatcttttctatgccagcttcaaggatattgatcagttgccttgcaacgtcggtagttaaccatagggttctatctacctgagcatcctctggcgtttggtctttagaagacaggtaatgaagacgtatcatcatggcgtcgtacgaatctactgtactaatgtcccaaccaacaagcgggtgtgtctgaataacttcatcatttctgtccatatagacccttattttgtagtgactatcatgagtgactaacgaggatcaatgcggctcattatcaagtgagcaatataagtataagcatatatttgattttatcgatagaaatcccttatttagaggtaaaaaaaatttgagtacaatttgtaggcattttgttcaggaaggggacaaataaaaaagccggacagcgacgcccggcaaagtcttaactggcctgtgcggcctgattgttattaatttatagggttagaaatcctggccttcggccgagaaccagtcgtcggcactctcccaggtttcctgcagaatttcttcaataatatctttatcggtctttgcgccgcccagtaccgacaggttgtttgccccggcatagcggacgtgtacgctattatccgtctcggaaaattgtttattgacccgcttgctcagttcagctgatagcgcttctagagcgccaaccggcaaaggttttgtcctgtcgatacagacttcaatacgcataacactccctccgtataatttatactgtgaatatatacagttaattttggaagagcaatagagagcgaataaaaaacgggaagaggtcagtctccccgttaaaagagtatcgcgaggcttagcaggcggtgactttccagttaagcgtttgaccggcaaggaatggcacgatcgaatcattgcccagcggaatggtttccggttgagtcacgggtgtgcgggtcagttcaacggtgccttcgttcaacggcaggccgtagaagttagggccgttctcagagcagaaggcttcaaagtgttgcagggcgttcatctcttcaaatacggtcgcataggcagagagcgcgagcggggcgttgaaacagcccgcgcagccacagctggactgtttcagatgcttggcgtgaggcgcagagtcagtgcccaggaagaaacgtttgttaccgctggcgataacttcacgcagcgcctgttggtgaacgttacgcttcagaatcggcaggcagaacaggtgaggacgtataccgcccaccagcatatggttacggttaaacatcaggtgctgaggcgtgatggtcgcgcccaggaactcgttgccttcctttacatactgcgcggcttctttggtggtgatgtgttcaaaaaccactttcagctgcgggaactgacgacggataggatccatcacttcatcgatgaaacgcgcttcacggtcaaagatgtcaacgtctgcatgggtcacttcgccgtgaataagcagaggcatgccaatcttctgcatgcgttccagcaccggataaatccctttgacgttggtcacgccgtggctggagttagtggtggcattggctgggtaaagtttcgcggcggtaaatacgccttcctcgaaaccacgagaaacttcgttcgggtccagggaatcggtcaggtagcaggtcaggagtggagtaaacgcgtgaccggcaggaatagcggcttcgatgcgagtgcgataggcaatagcggcgtcgacggtggtgatcggcggcgtcaggtttggcatcactatcgcgcgaccaaaaacttcactggtatacggcagaaccgtattcagcacagcgtcgtcacgcaggtggatatgccagtcatctgggcggcgtattttcaaaacttgcggtgttgcggtcatgttacaaaactccggcattgagagacaggacgttcaaaacaggtgcagtaatgggagcattatcggcggggtacaaggataagcgcaaactgctaaggatgcatcagtttgttaagctaacattgaaatcagtaggggccggggagcatagtggtcctcaattattagaagtcttgcacttcgctacgcgctaagaagctaaatttatcatacaggagttgaaactatggaaatcagaatcgttgccccactgaccgttaaaccggaatttattgaagaggttaccaccgcactgctggccgtcgtcagcgccagccgcgaagagctcgggtgcctacagtacgatttgcatcgagagattgataacccaaacaatttcgttttctatgagcgctggcgctccgatgaggccattgctcagcacgagcagagcgcgcacttcaaacactttgtgagccagattgaaggcaaactcgagaagattgaaatcaagaaactgaaactgtttgcctgatctgtcaacggcaatcctcagacataaaaaaacccgccattggcgggtttttagtgttaacgataacgcgatattactgcggcatttccggcttggtagccggtgccgtcgaggtgctggcggcggcgtggccaccggcagaccctttaccttcgaaatcgtatgccgggcgaacccaatcgctgaagcgtgctggctctgcaacgtaggcggcagcaggggctttagtcatcggcgcactggcgtgatgcttaaagcgtggctggtcgtctgcggttgacgctggaaccggtgcaacagaggctggcgctgccggaatctcaatagcaggagcctgagcttctgtcgcttcaatacctgcaacttcgagtttaaccgcgtcttctacctgcggtttaacagcttcaaccggcgcttcttcaactttcgcagattctacgacaggttcggcaaccggttctactgcggctggcttgacgacttctgcctctgcggttgcaacaggctcagaccttgctggctcaacaacggcaggctcttcggcggcggcttccacggcggcaggttcaacaaccactggctcggttggcgtcggtgcagggacttctgcatcggtcgcttcgagggtcgtcggttctacgacgtggggttcagcggcaacgaaggccttagtcgcttcgacttcttgctcgatcacttcctgcgcttctgcaaacgtcagagtagaggtcggaacgtgagtttcaacggctggcgcagattctaccggcgtcggcttcacttcggcaaccggggtcacttgtgcaggcgctggggtattttcctgggcgataacaacctgctcggtcaatactgcggcctggacggcaacgtccgctgccgctgcttcctgctcaacgttctgaacggcatcgacagcttgaacgacaggataggagatccacactttgcctgaagccatttctggcgacacgaacgcaccggccaatggcattggggactgagtcgggtaacgctcatcgcggtagcgacgacggcgttgaccgctgacgcgcaggtggcgaggagaacgacgagagcggcgtggcataccgttttcacgggtgttatcaccctgcgcatcttcggagtccacgtcgttcgctgcatcattcagtgccggttcggccgctttaggttcagctggacgctcggccggtttaacaccggtgataagcatctgtgctgcatcttcaacgtcctgatccacttcagactcgaaacgaatcttctgggtcagttgacgacgctggcgacgctgagacggcatgcgctcgtcctggtcttcaacggcggcaaccggtgctggcgctgcggcaacttcttccacgacgatgttttcagccgctttatcttccggctgatttttgcgtttgtcttcattgcgacggcgtgagcgatctccacgttcgcgacgaggctgctgctgttcttcgcggttaacgacgttttcaacgtcctgagcaacggcttcaaccgcaacaggctcttgattacgacggttacgacgattctcttcacgcggctcgctgcggctttcgttgcggtcattgcgctcggtacggtcggtgcgaccctcggtgcggtcagaacgttcgttacgatcgctgcgttcattacgattattacgttcaccgttacgctcgccacgttcaccgctacgctcattgcgctcgccgcgttcaccattgcgacgggtgccctgacggcgttgattacgacgatcgttgttacgacgattttcagtctcggtagcttctggctgtgctttaacttcttcaaccacagccggtttagcttcaggctctggcgttgaaccgaacagattcttcaggccgccaagcagtttgcccataaagccggtttttgccgcaggagccgctgccacaggagccgtgttaaccgccgtggtgcgagtttgtacaggctgcggtgctgccactggctgctcgtaagcaggaggtgcttctaccggcagagcgaaggtcgccagagcaggttgctcaggacgcttgcgctctgaaggtgggtcctcggaaggttgcagcatttcggcttcatgcagctgaggcaacaggtagctcagcgttgaagactcttcgcccttacgcacacgcattacgtggtagtgcggggtatgcatctggtcgtttggcacgataaccgcacgcacgccgccttgacgcttctcgatggcattcaccgactcacgtttttcgttaagcaggtaagaggcaatcggcactggcacgatagcgtgaacttctttggtgttttctttcagcgcctcttcttcgatcaaacgaagaatagacagtgaaagcgactcgttgtcacgaatggtcccggtaccgctacagcgtgggcaaacgtggtgcgtagactcaccgagtgacgggctgaggcgctgacgcgacatttccagcaaaccgaaacgagaaatacggccaatctggatacgtgcacggtcttggcgaacagcatcacgcaggcggttttcaacttcacgctggtggcgaaccggggtcatatcgatgtagtcgataacgatcaggccaccgaggtcacgcagacgcagctgacgggcaatttcgtcggctgcttcaaggttggtgttgaacgccgtttcttcgatgtcaccccgcgtgttgcacgtgcggagttgatgtcgatagcggtcagtgcttcggtggtgtcgataacgattgaaccgccggaaggcagacgaacttcacgctggaaggcagattcaatctgcgattcaatctggtaatgactgaacagcggaatttcgcccacgtatggcttgattttgctgctgaagtcaggacgacccagtgctgcaatgtgctctttcgccagttcgagaacctttgggttgtcgatcaggatttcgccgatgtcaggacgcagatagtcgcggaatgcgcggacaatcacgttgctttcctggtggatcaggaatggagcagggcggccttcagcggctttcttgatggcatcccagtgtttcaggcggaagctcaggtcccactgcagggcctctgcggatttacctacaccggcggtacgcacgatgaggcccatgccgtcagggagttgcagtgaagagagggcttctttcagttcggtacggtcatcgccttcaatccggcgggaaatacccccagcgcgcggattattaggcattaacactaaatagctgccggccaggctgatgaaagtcgtcagcgctgcacctttgttaccacgttcttctttatctacctgaacaataacttcctgaccttcgcgcagaacatctttgatgtttggacggccatgagaggaataattgctggggaagtattcgcgggcgatttctttgagagggagaaaaccatgtctttccgcaccataatcaacaaacgctgcttcaaggcttggctctatgcgggtgattttacctttgtaaatattggctttttctgctcgtgtccaggactttcaatatccagatcgtaaagccgctgtccatctacaagagcaacgcgcaactcttcttgctgagttgcgttaatcaacattcttttcatcttaacttactcgttatttttgcattattgtcagaactgcgggcaaaataacctctatggccggattaaaccgttggccccgagtcttctcgcatagtcgtcaacctcccggttgtcgcctgcataggggcgcattattttcggtaagactgcttttgccgggttaataaccacagcgtggtgaaagcagtacttttagtaggggaatagcctctgattttatgtagccagatctcattccatttgccggccaagctgcaacccgcagcccgctaattgcttgatttcacattacgtcttacgccattgctgcgtttttgtgtcatcaggcaaatctataattccagcgttttccctaagttcaagagaatcaacgcggaagtgaatccattattccattgctggcactgagatagcaaggtgacttttaggggaagctaaagttatttggcacctttgtgcgctttagcaccgcctttattcaccgattaaattgcctgttttaagtattccttcacagttgctggtaaacttagagttaagcacagaaaaatcagcggcgcgaaccccgccctcaatatttagaatcatctagaatcatggccaatgaaaactgagaatccaactgtacaattaatccccatcaccgaagaagaagccggtcagagaattgataactttttgcgcaccttcctcaaaggcgtgccgaaaagcatgatttatcgcattttgcgaaaaggcgaagttcgtgtgaacaagaagcgaatcaagccggaatataaattattggccggggacgaggttcgcgttcctccggtgcgggttgccgagaaagaagaggcgccggtttcagccaagctggacaaggttgccgcgcttgagcactgcattctgtttgaagacgatcacctccttatccttaataagccttccggcaccgctgtgcacggcggcagtggattaagctttggcgtgattgaaggactgcgcgcgctgcgtcccgatgcgcgtttcctggagttggttcatcgcctcgaccgtgacacctccggcgtgctgctggtcgcgaaaaagcgttcggcgctgcgctccctgcacgaacagctgcgcatgaaaaccatgcaaaaggattacctggcgctggtgcgcggcgagtggcagtcacactgtaaagttgtacaggcccctttattaaagaacatcttgcagagcggtgagcgtatcgttcgcgtcaatagcgaaggcaaaccttccgagacgcgcttcaagattgaagaaaaatacgcctttgccactctggtgaaggccagcccggtcaccggccgtacgcaccagattcgcgtgcacactcagtatgccggtcatcccatcgcctatgatgaccgctacggtgaccgcgagtttgacgcccagctggcaggaagcggcattaatcgcctgttcctgcatgccgccgcgctgcggttcgagcatccggcaaccggtgaaacagtaagaattgaggcccctctggagcctaaattgcgcaacgcgttgaccaagctgcgtaaaggcgtgaagtaatcaccgccttctgctcaaaaaattaagcgcctgcgggcgctttttttatgccgttggggtcaggggattgatgccgtggtcgcgcagcagggcgagcagggtaatcagcggcaggccaatcaaggtattcgggtcgcggccgtcgagcttatcgaacaggctaatccccagcccctcacatttaaagcttcccgcgcagtcataaggttgttcaagctgaacgtatccggcaatctcctgttctgaaagggcgcgaaaatgcacgtcgaaagtttcgcacagcgtctgagcctgaccgctgtcggcatcgaccaggctcaggccggtataaaagcgcacctttttgccgctcgccatgctgagctggcgacacgcattgtcaaaattgtgaggtttaccgaggatcgtttcttcgataacacagacctgatccgatcctatgataaggtaaccgggatgtttttccgccagcgcacgggctttttgctcggaaagacgcatcaccagagagacggcagactctccggcaagcggcgtctcgtcgatgtttggcgccgcccagtcgaatttcagcgtagttttctcaaggattgcgcgacgataggccgaggtggaggccagaaggatccttttttgtggcattgtttgcataatttttttcacaaagcatagcgttattgaatcacacattttaaactgtccgccgctgaggaagcgaatattggtgaaaggcgcagtaaaatgccctttttctttgactctacgtcgttacaaagttaatatgcgcgccctatgcaaaaggtaaaattacccctggccgttgatgccgttcgtaccgcccaaaagcgtttagactacattggagtctacgacgccgaacaagtgacgcgagttgccgcatcagtggtcagtgtggattcagatgtacaaacctctttgtcgtttgatatcgacaatcaacgtctggccgtaattaaaggtcattcagatgttactgttactctggaatgtcagagatgtggcaagacgtttgagcatcaggttcacacaacatattgttttagtcctgttaagaacgatgagcaggctgaggcattaccggaagcgtacgagccgatcgaagtcgacgattttggcgaagttgatctgctggcaatgattgaagacgaaattattctttcactgcctgtcgttccggtacatgaatctgaacactgtgaagtgtccgacgcggaaatggtatttggcaaattgcctcctgaggccgagaaaccgaatccgttttccgtattagcgagtttaaagaaaagtaattgaggagtaaggtccatggccgtacaacagaataaaccaacccgttctaaacgtggcatgcgtcgttcacacgatgctctgaccaccgccactttgtctgtggacaaaacttctggcgagactcacctgcgtcaccatatcactgccgacggtttctaccgcggtcgcaaggttatcggctgatttcttacttgctaactatttacttgataactttaaacttgttaagtaatagcaaggcgataccttgaaacgtttgaccatcgcgttagacgttatgggcggggacttcggtccttccgtcacagtgcctgcttcattgcaggcactgacctctaatcctgaactcaatcttcttctcgtcggcgatcccgataaaatcacaccactcttggctaagaccgatccttctttactggaccggatacgtgttattgccgctgagtctgtgattgcgaatgatgcgagagtttcgcaggcaatacgcaccagtcgtggaagctctatgcgcgtagcgctggagtttgtcaagagtggagaggcgcaggcctgcgtcagtgccgggaataccggcgcactgatgggattggcaaagctggttatcaagccgctcgaaggcattgagcgcccggcgctggtcaccgttttaccgaatcagcagcgcggaaaaaccgtggtgctcgatctggggccaacgtcgaatgcgacagccagatgctggtgcagtttgctgtgatggggtcggtcatggcggaagaggtggtaggtacgcctaatccgcgcgtggctctattaaatatcggtgaagaagagtcgaaggggctggataatattcgcgaagccgctacgattttaaaaaacatacccgtaatcaattatatcggctatcttgaaggcaatgaccttttgaccggtaaaactgatgtcatggtatgtgacggttttgtaggtaatgtcacactgaaaactatggaaggtgtgatcaggatgtttttgtcgttgcttaaatcctctggggagaatggcaagaagtcttggtggatgaggtggtttgggccagctttgcaaaaaatagtacagaaaaaattagcaaagcgtttcagtcatctcaatccggaccagtacaatggcgcaagtttgttaggattacgcggcatcgtgataaaaagccacggcggagcaaatcagcgggcgtttgctgttgctatcgaacaggctgttcaggcggtgcagcggcaggttcccgagcggattgccgcgcgccttgaggctttactacccaagagtgactgactgtacatgtatacaaagattctcggtacggggagctacttgcccgtacaagttcggactaacgccgacttagaaaaaatggttgaaacctccgatgagtggatagtcactcgtacgggtatccgtgagcgacgcattgcggcgccggatgagactgttgcaacaatgggtttgactgcggccgaaagggcgttggaaatggccggcgtcgataaaaacgacgtaggactgatcattgttgccacaacctcatcttcccacgcgtttccaagttcagcctgccagattcagaatctgctgggcattcgtgactcggcggcgtttgacctcgcagcggcctgtgcaggctttacctatgcactgagcgtggcggaccaatacgtcaaaaacggtgccgtgcgttacgcgctggttattggttccgacgtgctgtcccgcaagctcgacgacgaagaccgcggcaccgttatcctgtttggtgacggcgcgggcgcagtcttgctgggtgcctctgaagaacagggaattatctctactcatatgcacgccgatggccactatggcaatctgctgagcctcgagtatccaaaccagaaaacccctgaccaacccgcttatgtcaaaatggcaggtaatgaagtcttcaaagtggccgttactgagctggcgcacattgttgatgaaaccctgcaggccaataatatggaccgtgagcagctcgactggctggtgccgcatcaggcaaacctgcgcatcatcagcgcaaccgctaagaagctgggtatggggatggataaagtcgtggttaccctcgaccgacacggcaacacctcagcagcgtccgttcctactgcgttcgacgaagccgtgcgtgatggccgtatccagcgcgggcagttagtgctgctcgaagcatttggtggtggctttacttggggttctgccttagtccgtttctaatttttcggacctatatttactcttttgactaacacaggcgcgatgggtgttacacgcgctttattttgacaggatagttaaatgaccaagattgcagtcgttttccctggccagggttctcaggctctgggcatgctttcagatctggcggcgtcgcatcccgtagtggaagcgacctttgctgaagcttcttcagtattaggctatgatttgtggcagctggttcagcagggtcctgctgaagagctgaacaagacctggcagacccagcctgcgctccttgcggcctctgtcgctatctggcgcgtatggcagcaggaaaagggcgctgagccggcatatatggccggtcatagcctgggtgaatactctgcgttggtttgtgccggtgttctggatttcaagcaggctatcagcctggttgaactgcgcggcaaactgatgcaggaagccgttccggaaggaacaggcgcaatgtccgctattattggtctggacaacgagtctatcgccaaagcctgtgaagcgtctgcacagggtgaggttgtttcgccggtgaacttcaattctccgggccaggtcgttatcgcgggtaacaaagctgcggttgaacgtgctaacgaagcttgtaaagccgccggtgcaaaacgtgccctgccattgccagtcagcgttccttctcactgcgcgctgatgaagcctgcagcagataagttggcaattgcgctggatcaagtttctttcagccaaccacagtatcctgtcgttaataacgtggatgtgaaggttgaaacctcggcagaagaaattcgcagtgcgttgattcgccagctctacagtcccgtgcgttgggctgaaagcgtcgaattcattgcgcagcaaggcgttgagcagttagtagaggtgggtcctggtaaagtattaaccggactgaccaagcgtattgttgacaccctgacggcagtagcagtgaacgatactgcaagcctgtctgcggcgattgaacaataagaagaggaaaaccatgagcttcaacggaaaaattgctttggtcaccggcgcaagccgggggattggccgagctattgcagagaaactggttgccggtggcgcacgtgttattggcaccgcgaccagcgaacaaggtgctgaagctatcagtgcttatttaggcgaaaacggcaaaggttttgcactcaatgtgactgattcgtcgtcaattgatcaagtattggcgacgattcgtgctgaatttggcgaaatcgacattttagtcaataatgctggcattacccgtgataaccttctgatgcgtatgaaagacgacgagtggcaggatatcctggatacgaatttgacttctgtgtttaagctgtcaaaagcagtaatgcgatctatgatgaaaaagcggtttggccggatcatcaccattggttctgtagttgggaccatgggtaacgcagggcaagctaactacgcggcagctaaggccggtttgattggttttagcaagtctttggcgcgtgaagttgcttcacgcggcattactgtcaacgtcgtggctcccggcttcattgagacggacatgacaagggcgttgacagatgatcaacgcgcaggcattttgtcatcagttccagccaaccggttgggcgatgcaaaagagattgccagcgctgttgcatttttagcctctgatgaggccagctacatcactggtgagactttacatgtcaatggcggcatgtatatggtctgataatcactaggaatctgcttatttggctttaaaaatagtcaaatatagcaaaatagtggtttgaccagccgggatttagttgcatcttttccaacattttatacactacgaaaaccatcgcgaaagcgagttttgataggaaatttaatagtatgagcactatcgaagaacgcgttaagaaaatcatcgttgaacagctgggtgttaaacaggaagaagtagttaactctgcatctttcgtagacgaccttggcgcagattctctcgacaccgttgagctggttatggctctggaagaagagtttgataccgagatccctgacgaagaagctgaaaaaatcactactgttcaggcagctattgatttcatcaacaacgctcaggcgtaatcgaaactgttcttttaacaggttttgatagttaggcggtcatttgaccgcctaagtttttttcgtcccacggtattttttccctccctggaggacacacgtgtctaaacgtcgagttgttgtgactggacttggcatgctttctcctgtcggcaatacggtagagtccacctggaacgctcttcttgccggtaagagtggcattggcctaatcgaccattttgatactagtgcctacgcaacgcgttttgctggcttagtaaaagatttcaactgtgaagagtacatctcgcgtaaagatgctcgcaagatggatccctttattcagtacggtgttgctgccggtattcaagctatgcaagatagcggccttgaagtgacagaagaaaatgccccgcgtattggtgccgcgattggttcaggcattggcggattgggtctcatcgaagaaaaccatactgcattggttaacggcggcccgcgtaaaataagcccgttctttgtaccttctaccatcgtcaacatgattgccggtcatctgagcattatgttcggtctgcgaggcccaagtatttctattgccaccgcctgtacttccggcgtccataacattggtcatgcggcacgtatcattgcttataacgacgcagacgtgatgctggcaggcggcggtgagaaagccagtacgccattgggcgtaggtggttttggcgcagcgcgtgccctttcaacgcgtaatgacaaccctcaggctgctagccgcccgtgggacaaagaccgagacggttttgtgctgggtgacggcgccggaatcatggtgctggaagagtacgaacatgcgaaaaaacgcggcgcgaaaatctatgccgagatcgtcggttttggcatgagcagcgatgcattccacatgacttcaccgccggaagacggcgcaggtgccgcgttggcaatgcaaaatgcgctccgtgatgccggaattactccgtctcaggttggctacatcaatgcgcacggcacctctacgcctgcaggcgacaaggctgaagcgcaggcagtgaagtcggtcttcggtgcagacgcgcacagggttctggtcagttcgaccaagtccatgaccggtcaccttttgggtgcggccggtgcggtagagtctatcttcacgctgcttgcgctgcgcgatcaggccgtaccgccaacgcttaatctggataatccagacgaaggctgcgacctcgacttcgtaccacacgaagcgcgtcaggttaaaggcatggaatacagcctgtgtaactccttcggtttcggcggcaccaacggttctctgctgttccgcaaactgtaagcgtcacttaagctgaaagaaaggcccgttctgcgggcctttttgctgtctgtcagacgccgaaatcggattgaaagtcggaatgctctcgtggtatccatgggggactacgccagtctaaggccgaaggagagagataagatgtattgggttaacggtgtttctcagcactcggttgcgctgggtgaccgcgcggtgcagttcggtgacggctgtttcaccaccgcgtgggtaaagaactccagggtgcagcaccttgacgcgcaccttatacggctgcaaaaagccgttacagcgctgctgatgcccgattgcaactggggacagttgcgcgcagagatgcaggccgccgccgaggggtgtgacgagggcgtgctcaaggtcatactctctcgcggagagggcgggcgaggttacagtacccaaggggtgaaaggcccgacgcggattgtttccctgagcggttacccgcagcactatcacgcctggcgagagcagggcattgcgctggcgcttagtccggtggcgttggcgcgcagtccgcttcttgcgggcatcaagcacctgaatcgtctcgagcaggtgatgatccgcgctcatctcgataacaccgatgctcatgaggcgctggtggtggacaccgccggtatgctggtcgaatgctgcgccgccaacctgttctggcgtaagggagaccaggtattcacgcccgacctgtcaaactcaggcgtggacggcctcatgcgccaaaaaattatcgacgttttagcccattcggactcattcagcctcgagattgtcaaccaacccgttactacgttggcagatgctgaagaagtgctcgtttgtaatgccttaatgccaattctttcagtcagaaaggccgaaaactggcattataacgcctcgaaattatttgaatttttacatccgcattgcagctaagcgccgctgctgtttttttgtaaagtgaacaacgtcatgaaaaataaaaagatcaaaatttttggcattatcgtcatcgtcttagtggcgctgatgattgcgggctacgtcaaagttgaacgttttgccgatcgcaagctgaacatcgtccaggaaaagattttcaccctgccagccggtaccgggcgcgtggtattgcaggacatgctggtgagccaaaagcttatcaattctccgaccctgttcggctggctactgcgcatcgaaccggcgctgagcgaattcaaggccgggacctatcgattcccgcagggtatgaccgtgcgtcagatgctcgagctgctaaaaagcggcaaagaggcccaattcaacgttcgttttgtggagggtttccgcctgcaagactggatgcaggagctgcaaaaggcgggctatctcaagcatgaattgaccggcaaaagcgatgacgacatcgccaccgcgctgggcatgaaggacgctaaaaatgccgaagggtggctctatcctgacacctattcctatacggcgggcaccaccgacgtctcgctgcttaagcgtgctcatctgcgaatggaaaaaaccgtggcgcagatctgggccgatcgcgacccgtcactgccgtacaagacgccgaccgacctgctgaccatggcctcgattatcgagaaagagaccgcgctaaaagacgagcgccaagaggttgcatcggtatttatcaaccgtttacgtatcggcatgcgtttgcaaactgacccgacggttatctacggtatgggtgatgcctacaaaggggcgatcactaagaaggatcttgagaccgcaacgccgtataatacttacgttatcgaaggcctgccgccgtcgccaatcgctatgccgagtgaggcatccattcaggctgcggcgcatccggcgaaaaccgatttcctttattttgtcgctgacggaaagggtggacatacctttacgactaacctcgacagccataacaaggcagtgcgcgcgtatcgcgacctgatgaaaaacaagaatgaaaagtagttttattgttatcgaaggccttgaaggggcaggtaaaaccacggcgcgtgacgtcgtggtcaatacgctgcgcgaacaggacatcaaagacatccagtttactcgtgagccgggcggaacgccgcttgccgaaaaactgcgtgaccttattaaacaggggattgagggcgagccgctcaccgacaaggcagaggtgctcatgctctatgccgcgcgcgtacagctggtcgaaaacgtgattaaaccggccctggcacgcggtgcatgggtcgtcggcgaccgtcacgacctctcctcccaggcctatcagggcggtggtcgcggtatcgacgcacgcctgatgacctctctgcgcgacacggtgctcggcgattttcgccctgacctgacgctttatcttgacctgcccccggctattggcctgcaacgcgcgcgcgcgcggcgagctcgaccgaatcgagcaggagtcactggcgttttttgaacgcacccgcgagcgttacctgagtctggccgccgaagatgaccgcattatcactatcgatgcgtcacaaacgctcgagcaggtgaccgccgatattcgccgcgcgctgattggctggatttcccgccagcgccagcaggacagccgcggatgaattggtatccctggctaaacggtccttaccgccagctgatcgcccagtatcagggcggtcgcggccatcacgccctgttgatgcatgctgccaaaggcatgggcgacgaggcgttggtctatggtctgagccgctggttgctgtgtcagcatcctgacggggaaaaaagctgtggaaaatgccacagttgccatttgatgattgccggtaaccatccggactggcacgtcttgacgccagaaaaggggaaaaataccctcggcgtcgagccggttcgtcagctgattgaaaccttgtacaattattctcagcagggggggcaaaagtcgtctggctgccgcaggccgaactgctgaccgaggcggcggccaatgccctgctcaagacgctcgaagaaccccggccgggacctatttcctgctgggttgccgtgagccgtcgaggctgttgccgacgcttcgcagccgctgtttttactggcatctagcgacgccggaggcctcactggccgcacagtggattgcccgtcagcttcaggttgcgccactgtcgattcagaccgcattgcgtctcggcgaaggcacaccgttggccgcgctggaactgcttcagccggagcgctggaaacagcgcgaacagctgtgtcagcaggtctccgccagcttccagcagcgctgtctgctgtcgctgctccctcagctgaatcatgatgatgccgttgaacgcctgttctggctgtgttcgctgctgcttgacgtcatcaaatatcagcagggtgcgggtcattacgtgattaatctcgatcagcagccgctgattgccgcgctggccaataccttaagcaatgaggcgttgcagcagaatctgcagggttggatgcgctgtaggcaacagttgctcagcgtcgttggcgttaaccgagagctgctgctcaccgaacagttgctggaatgggaaaactcgctttaagcctgttcctgtaaattttacctgcaaacacaaagagttaaatctatgtttttagtcgattcacactgccatcttgacggcctggactacgaaaaactgcacggcggcgttgacgatgtgctggcaaaagcccgcgaacgcgacgtgaaatttatgctggcagtagcctgtacgctgcccggttaccgcgcgatggcagagctgattggcgatcgtccagaagtgtccttctcctgcggcgttcatccgctgaatattgagggcggatatgacttcgaagagctgcgcactcaggctgctgatgcgcgcgtcgtcgcgatgggtgagaccgggctggactatttctatcagaaagaagaggcgctgattaagctgcaacaggattctttccgtcatcacatccgcgtcggtcgtgagcttaacaagccggttatcgtgcacacccgtgatgcccgtcaggacacgctggatattttgcgtgaagagaaggccggtgaatgtggcggcgtgcttcactgctttaccgaagaccgtgacacggctgagcaactgttggatctcgggttatacatctccttctcgggaatggtcaccttcagaaacgccgaacaaattcgggaagccgcgcgctacgtgccgctggaccgcatcctgatcgagaccgactcgccttatcttgcaccggtgccgcatcgtggaaaagagaaccagccggcctacgttcgcgacgtagctgagtatctcgcggtggttaagggtgtcagcctcgaaacgctggccgtagccacaacgcaaaacttctcacgcctgttccacgtagacgctgcccgcctcgcctgatactgcgtgtagcgttttctgcattttatttttcacctcgtaattaatcgtctgaaccgctaatctgcacgccgcggtttgggcgatactcgccggcgatccggatataaaacgcctgatttattgaaaatacgccactttttacgccatcgttggcgtttttttaacaaaacgtgactgtcatcaaataatattgaggcgatttattttacccttcgtaaaaaataaaaggggcaaaaatatgtcccgcccgcagcggcgataaaagccgccgcaacagggtttacggcacccgctaaagaccctacgaagcagatacccgtcgtcatcaagactcagccttggctgagtctttgagtaacaagggtatgaccattactcaggagcactctcatatgttcaagaacgcgtttgcaaaccttcaaaaggtcggtaaatcgctaatgctgcccgtttccgtcttacctatcgcagggatcctgctgggtgtcggttcggcaaactttagctggctgcccgtcatcgtttctcacgttatggccgaagcgggtggatcagtctttgccaatatgccgctgatttttgctatcggcgtagcgctaggtttcaccaacaacgacggcgtctctgcgctggcggcggtggtggcctacggcatcatggttaaaaccatggccgtagtagcaccgttggtcctgcatcttccggcggaggagattgtcagcaagcatcttgccgacaccggcgtactcggcgggattatgtcgggcgtgattgcagcctcgatgtttaaccgcttttatcgcatcaagctgccggaatatctgggcttctttgccggtaaacgcttcgtgccaattatttccggactggcagcgattatccttggcgttgtgctgtcctttatctggccaccgatcggcagcgccattcagaccttctcccagtgggcagcctaccagaacccggtggtggcgttcggtatctacggcatcgtagaacgcgcgctggtgccgtttggtttgcatcatatctggaacgtacctttccaaatgcaggttggcgaatacgttaactcggcgggccaggtgttccacggtgacattccacgctacatggcgggtgacccgacggcgggcaaactgtccggcggcttcctgttcaaaatgtacggccttccggccgcagcgattgctatctggcactcggcaaaacctgaaaaccgggccaaagtgggcggcatcatgatgtctgccgcgctgaccgccttcctgaccggtattaccgagccgattgaatttgccttcatgttcgtcgcgccaatcctctacgtgatccatatgattctggccggtttggctttcccgatttgtattctgttggggatgcgtgacggaaccagtttctcccacggcttgattgacttcgtggtgctgagcggcaacagcagtcgtatctggctgttcccgatcgttggcgtgatttatggtctggtgtactacactattttccgcgtgctgattgtcaaactgaacctcaaaacaccgggccgtgaagacactgcgacgacacagacggcacagggcagcagcgaaatgtccgcctcactggtcaaggcgttcggcggcaaagaaaacatcaccaacctcgacgcctgcattacccgtcttcgggtgagcgtggccgacgtttccaaggtcgatcaggcgggtttgaaacaactgggcgccgcgggtgtggtcgtcgcaggttcgggcgtacaggcgatttttggcaccaagtcggataacttgaaaacggatatggacgactatatccgcaaccactaatcgacaagtaaaacactcgtatcataaaaataaaaaaggagacttcggtctccttttttattttaaaattcatgagagtgtcgtgggtggcgttgttgaaaagaccggctggtgattacaaaatagcaggcgacatcggttgggttttagccaatcaaacgtggcggcagagagacaaaagacgatctgatatccgttgccgccgctccttattcgggtattgagttgcaaacgccctaataaacttgaaaatagcagaatggctgactcatactgcgctcgcagttatttgtaataaagagctttcaatggagaactatcatggccgaagaaacgattttcagtaaaattatccgccgcgaaattccggctgacgtggtgtatcaggacgaactggtgaccgcgtttcgcgatatcgccccgcaggcgccaagccatatcctgattattcccaatatcctgatcccgaccatgaatgacgtgaccgccgagcatgaagccgcactgggtcgcatgatgaccgtcgcggcgaaaatcgccgagcaggaaggtattgcagaaaatggttaccgtttaattgtgaactgcaataaagacgccggtcaggtggtgtatcatatccatatgcacttggtgggcggtcataatcttggccctctgctgtcgcgttaacacgcggtttcgccatcaggatgcccgctgctgcgggtgttctagcgcttattgagggaaggttatgcgatttttgattgcctgtgcgatgttgctttgtctggcaggatgcagtacgaaaccgggcattgcgctgaataatcagcaaacggttatcatggagtcgccggtcttgaccgcagggattatcccaggcgagccgtcactttccaacgacgaaggacgccaaaaggcgacgctgacgctcagcaataatcagtctaaaccgatacagatacactatgtattctattggtatgataagcaggggttggacctgctgccgtttgctgcgccgcgaaccattaccgttccagcaaattccgacgccgatatctattcgcttaacggcaatcttgatgcgtacagtgtacgtgtccacctttacctttaatttcccgtagggagagggttgatgaaaaagtatttaatcgtggcattggcaactttagcgttaagcggttgtatttccacccagcaagaacaacaagagcagcaacagcctcagacaccaccgccgacgaccgcgcctatcaccaccgtgccgcctatcggtacgcctgagacctcgggtcagccgccggttgaaactattcctcagccgccgaaactgcaatccattgactggagcgcaacggtacagccgttagtggcgaaaatgctcaaggctgacggcgttcagtctggcagcgttttactgttggataacgtgaagaacagcactaacggttcgctgcaaaccggtaaaataaccgatgcaatgcataccgcactggcgtctaacaacaccttcaccgtggttccggcttcgcagctggcgagcgccaaacaggcgatgggcctttctgccgacgacaacctggtctcgcgcagcaaggcgattgcgctggcgcgtcaggtcaatgcccagtatgtgctgtacagcgatgcgagcggcaacgtgaaatcgccaacgctcgatatgcagctgatgaccgtgcagaccggtgaaattgtctggtctggcagcggtgccgttcaaaatcaacagtagtttacgcagtctccttgaaaaacatcttccggcggattattccgccggttgtgtttttactccggtagaagggttgagcagcgaaagctggcggattgaatcgcccacgcatcgctatcttgcccgccttgaatcggctgaaaaacagttgctggggatcgaccggcggcgtgaaaaccgcctgctgcgccacctctcttccacgggcatcgcgcctcaggtcttgcgttgggcgtatccctggctggtggtgagttgggtggacggcgaaacactgagtcaggcgctgtttttctccgccgagcagcagcggcagttggcggccttgttggcccgactgcacggcgttgcgccgcagggcgaggtgctggatatccgacggcggctggggcgatactggcaggcgattgaccggcggcgtttgacaccggcgtggctgcgagtgcaacagcgaatgatgaaacgctcgccgccaaaggcgctgaagacggcggtgacacacatggatattcatcctgaaaatggggtcgtgagtccgcagggcacgcgcctcatcgactgggaatacgcggtttctgccgatatcgcactggagttcgccgccttgtttcgcggcaatggctacagtccgtctcagcaatcgcagctgttgctggactatgcccggtgcggcggataccccgaccttgtgcggcttgaggcgcagatccgcctctggcaaccttggctcgattatctgatgttaatgtggtttgaagtgcgttggcagcaaaccgccgatgcgcgctatacgctttgggcgcagcctctgcgccagcaattattttctgaatttcagtaaaggagtagtgggtcttgggtccagtaatgttagacgtcgccagctatgagctggatgctgaagagcgtgagattttacaacacccgctggtcggtggcctgatcctgtttacccgcaactaccacgacgtggatcagttgcaggagttgatccgccagattcgcgcggcgtcccgcgaacgtctggtgctggcagtcgatcaggaaggggcagggtgcagcgctttcgtgaaggttttacccgtattccggcggcgcaatcttttgcagctttgaacgatgaacctgaggccggacgtctggccgaagaggcgggttggctgatggcggcagaaatgatcgccatggacatcgacataagcttcgcgccggtcctggatatcggccacatcagcgccgctatcggtgaacgttcgttccatgaaaatccacagaaggcactggatatcgccgagcgctatatccgcggcatgcacgccgcaggaatgaaggtcaccggcaagcacttcccgggtcatggcgcggtcaccgcagactcacacaaagagacgccgttcgactcacgtccgcttgaggtgattcgcgctcatgatatggcgattttccgccagcttattgaacgcaagatgctcgacgcggtgatgccggcacacgtgatttatactcaggctgacccacgtcctgccagtggttcgccctactggctgaaacagatcctgcgtcaggaactgggtttcaacggcgtgattttctccgacgatttgtcgatggaaggcgcggcggtgatgggcagctacgccgaacgcggtcaggcttctctcgatgccggttgcgatatgattctggtgtgcaacaaccgcgacggtgcggtcagcgtgctggataacttgtctccagtcaaagcggacaaggtggcgggcttgtaccatggtggggcctatcagggtaaatccagtcgtcaggctttgcgagacactcgccgttggcagcgttctcaccaagagcttacggcgctgaatgagcgctggcaggcgcacaagcaggcctgacagcgcgttagctgtttcaggcttttgcagtgataccgaggtttaatgaggaaagatatgatcatttatctgcatggctttgactcaaccagtccgggtaatcatgaaaaggtgttacagctacagtttattgaccccgacgtgcgctttatcagctacagcacgctgcatccgcgtcacgacatgcagcacctgcttaaggaagttgataaggcgttgcaacaggctccagacccacatacggtgatttgcggcgtgggtctgggaggctattgggcagaacggatcggctttttatgcggtgttcgtcaggtgatgttcaaccctaatttgtcaccacagaacaacatgacaggcaagatagacaggccagaagagtacgttgatattgcgaccaaatgtatcagtgattttagagaaaaaaaccgcggtcgctgtctggttatcctctcgcgtgacgacggtgtcctcgacagcgccgaaacggccaaggctctctctccctattattctatcgtctgggaccaggttcaaagccataagtttaaggatatctcggtccatttgcagcgaatcaacgccttcaaaaatctttcctgaaaaatagtctctttgcgtcccggtgctaactgattgaatagcaagatgcaaaatttttgttacctctgggacgcagtcaaaaagaattgatgcagatcaattttggtataatcatccgactcccgcatgttatcctcgtctttcaagatgatttaacttgagcaaccctatgttatctaaggataataacgttacccttagataacatttggtttacatttgagggagtcatagtgactgaagcaaagaagaaaattgtgattatcggcggtggagcgggcggtcttgagcttgcaaccagcctgggtcacaaacttggccgtagcaagaaggccgagatagtgttggtggaccgcaaccacagccacctgtggaagcctctgctgcatgaagtcgccaccggaagcctggatgacggcgttgacgcgttgagctatcttgcccacgcgcgcaatcatggattcacattccaaatcggtacactgaccgatatcaaccgcgaaaataaaagcattaagctggccgaaatccgtgacaccaacggagagctgctggtgcctgagcgcgatctggactatgaccaactggtgatggcgctgggcagtacttctaacgacttcggcacgccgggcgtgaaagaaaactgcattttcctggataacccgcatcaggcacaccgtttccacaatgaaatgttaaatctgttccttaaatattcggccaatcccgataaacagggcaccgttaacatcgctatcgtgggcggcggcgcgaccggcgttgagctttctgccgagctgcacaacgcggtgaaagagctgcacagctacggtttcgaaggtctggacagtcaggcgctgaacgtaacgctggttgaggccggtgaacgtattcttcctgctttgccgccgcgcatttctgccgctgcacatcaggaactgaccaagattggtgttcgcgtattgaccaaaaccatggtgaccagcgccgagaaaaacgggctaaacaccaaagacggcgaatttatcgaagccgatctgatggtgtgggctgcggggattaaagctcctgatttcatgaaagatatcgcgggtcttgagaccaaccgtatcaatcagctggtggttgagcctacgctgcaaaccacgcgtgacccagatatttacgcgatcggtgactgtgcttcctgcgctctgccggcgggcgggtttgtgcctccgcgcgcacagtctgcgcaccagatggcctcacgttgctatgccaacattctggcgcagcgcagcggtcagagcctgaagccgtacgtttataaggaccacggttcactggtttcgctttcgcgctttagcaccgtcggcagcctgatgggtaacctgaccaagggctcgatgatgattgaaggtcgcctggcacgtctggtctatgtttccttgtaccgtatgcatcagattgcgctgcacgggtatgtaaaaacaggcctgatgatgtttgttggcagaattaaccgcgtgcttcgtccgcgtcttaaactgcactaaacgtttgacccgcctccgattttttttaaatcggaggctgaatcgattcgagccatagactgttggctttttactgccactctctcgcacttctcttaagaatcctcccaattcctgcttcacctgcactttatctgttggttttatccaaaagtcttattgtccctcggacgctaattgcgcaaactttgacacaggttcaaacgaactctttacagcaggcgattcacgcacgccgtttcctcagagggattttgttagggggagcaaaatgcgtggtaacactttcaggaggatgtcctgtgaataagtcaatgttagctggcgtcgggatcggcgttgctgcggcactgggtgtcgcagctgttgcaagtatgaacgtattttcttctggtccgcagtatgcgcaggtcgtaagcgcgacaccgattaaagaaaccaccaaaacgcctcgtcaggagtgtcggaacgtgacggtaacgcatcgtcgtccggtacaagacgagaatcagattgcggttctttactgggggcagtagcgggtggggtaataggccatcagttcggcagtgggcgcggacgcagcctggccacggtagcgggtgccttgggtggcggctatgcagggaaccgcgtacagagcagcatgcaggataacgacacctactccacgcagagacaacgttgcaccacggtctatgacaagtcggagaaaatgctgggctatgacgtcacctataaaattggcgaccagcagggcaaagtgcggatggaccacgatccgggcaccaagatcccattggataaaagcggtcagcttgagttgacctcaacgcgtagctaatcgccaaatcctaaaaataaaaacctgagtttttagctcaggtttttttatggcggttattcaggaaatcgtcaggcgggaagctggtgcccggcgaactcctcaagcagttcatcgacaaatttcaggcgtttcggcctgtcggtcaggtccagcataaacttcagcttgctcgggccgtccagtcggtacacctgaggctgcttctggagtaaaccaatcagataccccggatcgacgcggtttttgtcgctgaattcgatgaaaccgccgcgctcgttgccctcgatgcgcttaatccccaacgctttcgccttgagtcgcagcacggcgatgctcagcaggttacgcgcaccgtctggcagggtgccgaaacggtcaatcagctctacgcgcagttcatcgacttcctgctggctgcgtgcgctggcgatacgtttgtacagcgacaggcgggtgttgacgtcaggaataaactcctcgggcagcagcgcaggcatacgcatctcaacctcggtctggctggtagtgaggtcttcgagagacggctcgcgccctctttcagcgcatcgacggcgttttccagcagctccatgtacagcgagaagccgatggtggtcatctggccgctctgatcttcgccgagcagttcgcctgcaccgcggatctcaagatcgtgcgtcgccagagcgaagcccgcacccagatcctcgagtgaggcgatcgcctcgaggcgtttgtgcgcatccgccgacatcgccttcggatttggcgtcagcagataagcgtaagcctgatggtgagaacgtcccacgcgaccacggagctggtgtagctgcgccaggcccaagtggtcggcacgttcaataataatggtattggcagttggaatatcgataccggtttcgataatcgtggtgcagaccagcacgttgaaacgctggtggtggaagtcgttcatcacccgttcgagatcgcgttcgcgcatctggccgtggccgatcgcaatgcgcgcttcagggaccagctccgccagacgttccgtggccttgtcgatgtttgccacgtcgttatacaggtagtaaacctgcccaccgcgcaggatttcacgcaggatagcctcgcgaaccactaaattgtcgtattcgcgaacgaaggtcttcaccgccagacggcgtgccggtggcgtagcgataattgacaggtcacgcatgccgctcattgccatgttcagcgtacgaggaatcggtgtggcggtcagggtcagaatatcgacatcggcgcgcatcgctttgatacgttccttgtgccgcacgccgaaacggtgctcttcatcgactatcagcaggccgagatctttccagcgcaggtcgctctgcaacagcttgtgggtgccgataatgatatcgaccttgccctcaatggcctcttcaagcaccgcctgctgctctttggcgctgcgaaaacgcgacatcatctcaatgcgcacaggccagttagcgaagcgatcgcggaagttgtcgaagtgctgctgcgccagcagagtggtcggtaccagcaccgcaacctgcttgttgttggaaaccgcgaggaacgcggcgcgcatcgcgacttcggttttaccaaagcctacgtcaccacagaccagacggtccatcgccagcggctgagtcatgtcagtcagcaccgcgttgatggcctgcgactggtccggcgtggtttcaaacgggaaggtctggcagaacagctgatactgttctttgtcatgcttgaaggcaaaaccggctttggcttcgcgctgggcgtagatgtcgagcagttcagcggctacgtcgcgaaccttctctgccgccttctgccgtgccttggaccaggcttcgccaccgagtttatgcagtggtgcggtttcgtctgcgccaccggcgtagcggcttatcagatgcagcgacgagaccggtacgtaaagcttgtcttcaccggcgtaggtgaggatcaggtattccgctttgataccgccggcttcgagggtcgtcaggccgagatagcggccgacgccgtgttcgaggtggaccaccggttgtccggggcgcagctcggcgaggttgcggataagcgtatcggtgttgatagcacggcgcgtatcctgacggcggcgggccacgcgctcacccagcatgtcgctttcacagaccagtgccagctgtttttggttatcgagaaagcctttttcacacgcgcctatcatgatgtagcgacccggtgcggtagcctcttcgatgcgctcaatcagggtcggattcagcttgatacggcccagcaggtcctgcagcgtctcgcggcggccctcactctcgaccgagaacaccagactgccgccaaaggattcgttgaaacggcgcaggttgtccatcggcgccttgttttgtggcaccacggagaggtctggtaacggctgatagtccaggttggtgttggcgcttttttccggcagtcgctcggccttgagctgaatacgcggccatttttttagctctgaatagaggccatccaccttgagccacagcaggtcaggctcaaccagcgggcgcattggatcaatgcggctgctctcgtagcgctgcaccacgtcctgccagaagcgttcggcggcgtgttccaggtcaccggtgttcagcaccagcgtattttctggcagatagctgaacagcgtgctcagcggctggctaaagaacagtggctgccagtattcgataccggcggggaaggtgcctttactcacctgctggtaaacgtgctcggcgtcgcggcgcacctcgaacttctcgcggaactggctgcggaacagctcgatagcgttcttgtcggtcgggaattcgtgcgcgggcaacagattaatagactcgacttcgctcagcgtacgctgggtatcgacgtcaaacagacgcaggctgtcaatctcgtcatcgaagaagtcgatgcggtaaggctcttcactgcccatgggatagaggtcgagcagggcaccacgggtagcaaattcgccgtgttccatcacctggtcaacgctgcgatagcccgcctgttcaagctgtgcgcgcagtttgtcgcgcgacaggcgctggccctttttcatcaccagcgcgtgcccgtgcaggaactcgtgaggacaaacacgctgcatcaaggtattgactggaaggatgataatgccacgctccatggtcggcagctgatacaggctcgacagacgggcggaaataatttcctgatgcggagagaaactgtcgtaaggcagcgtttcccagtcggagaggctgatcaccttatgttcggtaaattgctgaatttcgtcgcgcagacgcaaggcattttgcatatccggcgcgataagcatcaccggacccgcgtggcgttcgctgatttgggcgcactccagcgcgcaggccgagccggtgagttgccccaactgacgggtatcgccgggacgctctggcagtgaataacgcggctcttgaggcatattttgaagcataagcagtttcgcaatctcgtttgtcggcgggggaagtccgaattttcagaccgtatcttgcgatgcggtttgctatcaggtcaatccgatttgtacacgactctacataaataaaagccgcatagttacaccgttaatggttccataaagcactggtagcctttattatccttgatcactttgcaatgagctactgcacttaacggatttcatgtatcaacctgtcgcgttatttatcggcctgcgctacatgcgcgggcgtgcttcagaccgctttgggcggtttgtctcctggctatccaccattggcatcacccttggggtgatggcgctggtcacggtgctgtcggtcatgaacggttttgagaaagatctcgaaagtaatattttgggactgatgcctcaggcgtacatcaccacggcgcagggatcgctaaatccaaaacaaatcacccacgacgacgctgcaaaattgcagggtgtgaatcgtgctgtgcctttcacgaccggtgacgtggtgctgcaaagccccggtaacgttgcggtaggcgtgatgctgggtattgaccctcaggagaatgacacgctctcgaaatccctggtgggtgtcagtcagcaggacctacagccggccagtacaaggtcatcctcggcagtcagctcgcgcagcagctcaaggtgcagcgcggcgacaagctgcgtctgatggtcaccagcgtcagccagttcaccccgatgggcaatatcccgagccagcgtatttttactgtagcaggcacttttgacgccaacagtgaagttgacggctatgagatgctggtcaacattcaggacgcgtcgcgcatgatgctgtatccgctgggcaatgtcactggctggaggctgtatctgaataaaccgctcgacgtcgatacgctcagcactcaggcgctgccaaagggcactgaatggaaggactggcgcgagcgtcgcggcgaactgttccaggcggtgcgcatggaaaaaaatatgatgggcctgctgctgagtctgattgtggcggttgctgcatttaacatcattacttcgctgggcctgctggtcatggaaaagcagggtgaggtcgctatcctcaaaacccaggggctgacccgcgcgcagattatggcggtgtttatggtgcagggcgcgagcgccggtatcatcggcgcgttgctcggtgcggtgctgggcgtgctgctcgcgacgcaactgaacaccatcatgcctgcgattggcgtgatgcttgacggcgcgtctctgccggtcgacatcgaaccgatgcaggttattgttattgcgctggtggcgatggtcatcgcgttgttgtctacgttctacccttcatggcgcgccgccgccgcccaacccgcagaggctctacgttatgaataattctttgttgttgcagtgcgaaaacctctgtaagacttaccatgaaggcaaactcaataccgacgtgctgcgtaacgtttcgtttgccatcaagccgggcgagatgatggctatcgtgggcagctccggttccggcaagagtaccttgctgcacctgctgggtggtctggattccccgacctcgggtgaggtggtgtttaaggggcagtcgctgaacgcgatgtcttcttccgccaaggccgaactgcgtaaccgccaactaggctttatctatcagtttcaccacctgctgccggactttaccgccctcgaaaacgtggccatgccgctgctaatcggtaaaaacaaggcgtcagaggtgcaggacaaggcgcgtgagatgctggcggccgtggggctcgagcatcgcagcaagcaccgtccgtccgagctctccggcggtgaacgtcagcgcgtggcgattgcccgtgcgctggtgaacaatcctgcactggtattggccgatgagccaacgggtaacctcgatcaaaagaacgccgacagcatctttgagctgctcggcgagctcaatgtgcgtcagggcacggctttcctggtggtcacgcacgatttgcatctggctaatcgtctcagccgtcagctcgaaatgcgcgacggtaagttacagcaggactcaaccctgttggggcgcgttaatgtcagctatgcctttttcccttcttattggcctgcgttttagccgtggccgccgccgtggcggcatggtgtcgcttatttcggtgatttccacgctgggcattgcgctcggggtagcggtactgattgtgggcctcagcgccatgaacggttttgagcgagagcttaaggaccgcgtgctggctgtggtaccgcatggcgaaattcgcccggttaatcagccatttattggctgggaagacgttatccagcgcgtcgagaaggtgccgggcatcgttgcggcggcgccttacatacagttcagcggtttggtcgaaaacggggccaagctgagggcgctacaggttaagggggttgatccccaacaggaagagcgcatcagcgcagcaccgaaatttgtacagggcgatgcctggcagaacttcaggcctggcgagcagcaggtgattctgggtaaaggggttgccgatgcgcttaacgtcaagcagggcgattgggtaacagtgatgatccccaacagcgaccctgacatgaagctgcttcagcctaagcgtatccgtctacacgtgagcggaattttgcagctcagcggacagcttgaccacagtatggcgatggtgccgctggccgatgcccagcagtatcaggacatgggatccagcgtaaccggaatcgatatcaaagttaacgatgttttcgctgccaacaagctggtacgcgatgcgggcgaggtcacaaaagcctacgtctacattagcagttggatagggacttacggttatatgtaccgtgatatccagatgatccgcgccataatgtatttagcgatggtgctggtgataggtgtagcctgctttaacattgtctccacgctggtgatggccgttaaggataaaagcagcgatatcgcagtactgagaacgctgggtgccaaagacggacttatccgtgcggtgtttatctggtacgggctgatggccgggctggtaggcagcgtgctgggcgtggtgattggcgtggtggcatcgcttgagctgaccaacatcatcaacctgttgcaaaaaatggtcggtcataaatttttatccggtgatatctacttcatcgattttctaccgtcggaattgcattggttagacgttttaagcgttttagcgaccgccctggtattgagcctgctcgccagctggtacccagcgcgtcgcgctagtcgcatcgaccccgcgcgcgtattgagcggtggtcagtaatcagtcttcttgagcaaagaagtttttccggataaagaaaaggagcggtgaatatgcgcacacgccatcggctgcgtcggtttcgcaaaaataagcgcatacgccatcagcgttttcggtcgaatatcttccatcgcgacagtatggccgcggcggagttgaaaagaccgttcgtggtggtgctcaccggtgccgggatctcggccgaatcagggatccgcactttccgcgccgcagacgggctgtgggaagagcataaggttgaagacgttgccaccccggaaggctatcggcgtgacccgcagcgggtgcaggcgttctacaacgctcgccgtcagcagctgcaacaggaaacgattcagcccaacgcggcgcatcaggcgctggcggtgctcgaagaggcgctgggagacaacttcctgctggttacgcaaaacatcgacaacctgcacgagcgtgcaggcagttctcgggtgctgcatatgcacggcgagttgatgaaggtgcgttgtaccgagtcgggacaggtgtttgactggaaccacgacctttcggttgatgaccgctgccactgctgccagtttcctgccccgctgcgcccacacgtggtgtggtttggtgagatgccgttgcggatggacgaaatctacaccgcactgggcaaagccgatttctttattgctatcggcacttccggacatgtgtatccggcggcaggctttgtgcatgaggcacgggttcagggagcgcataccttcgagctcaatctggagccgagtcaggtcgaaagccaattcgatgagcgcatttacgggcttgccagtaaggtggttcccgagttcgtgcacgcatttctgagcaagaagagcgacagctggcgttaatttcccaccaggctgtaaacgtactaaaaatgacctgacgcaatatttgagatattcaggctgcgcataatgaaactctgtcgccagaggatgcctgaatatggataacttgcttgaccgtttcttccactatgtctcttttgatacccaatcaaaagccaacgcaaaatccaccccgagcagtgaaggacaggtcaaactggctctctcactgcgcgacgaactcatctcgctcggctttgaccgcgtggtattgagccctaaaggctgcctgaccgctacgctgcctgccaacgtcagttggccagtacccaccattggctttatctctcaccttgatacagcgcctgatttcagcggcaaaaacgtcaacccgcaggttgtcgaaaactatcgcggcggtgatatcgcgctgggacagggcgaagagatactctctccggtgatgttcccggtgttgcatcaactgcttgggcagaccctcattaccaccgacggtaaaaccctgctcggtgccgataacaaggccgggatcgccgagatagtcaccgcgatggtgcggctcaaaaatggcgatattcctcacggtgatgtgcgcttcgcctttacgcctgatgaagagattggcaaaggcgtgcagaattttgacgtcgagcagtttgccgctgagtgggcctacaccgtcgatggcggcggggtaggcgagcttgaatatgagaactttaatgccgcgtcggcgacaatcaaaattgtgggtaacaacgtgcatcccggcagcgcaaaaggcgtgatggtcaacgcattgtcattggcgacgcgtttccatcaggcgctaccggcttcagaaacgcccgagcagacgcagggttatgacggtttttatcatctggttagcatcaagggcacggtagaacgcgccgaaatgcactacattgtgcgtgatttcgaccgaattcggtttgaagcccgcaagcataaaatcatagaggtggcgcagtgggtaggggaagggctgcaccgcgactgctatatcgatgtcaccctcgacgatcactattacaacatgcgagagcaggtgatgaagcatccgcatgtgatcgaatgtgctcagcaggcgatgaaagactgcaatattcagccgacggtcaaaccgattcgcggcggcacagacggcgcacagctctcatttcgcggcctgccttgcccgaatatttttaccggtggctataacttccacggcaagcacgagtttattaccctggaagggatggagagtgcggtatcggtgattatgcggattgtagcgctaaccgcggagaatgcggctaagaaaagatagcggttcgatcccctcgtccatgagcgaagaaggggatcgtttaaggcttagtcgttgaaataccagtagccgttgttcactaatgcgcaaagtgctgcgaggaaagaaggatcctcgagcgcgtcgcccagcatggcatgagtgacggtcaggttacggctcaacgcatccgcagcggcggtctgttcggtcacaatcgcctcaccgttcacgtagcaacgatcgccaacgtgcagaacgcgaagcccacccaggcgttgcagcgtctcacccgactccagcagctcgtacacttcacccggctgataaggcggctccggtggcgcaacgtcaagctcgtggcgtgactgagagatgaactccccaaaccagctgttgaaatgctcctgattgttcaccagatccagcatcatgttgcgcaggccgtcaagctcgtgctgctggatctcggcaggatgatcgcgtttcaccagcgttggatcgctataacgtttgctgcccagctcgcgagacagcgcgtagtcggcgaaactgctgatcatttcgcgtgagttaggtgcacggaagccaacggaatagttgagggcattctcaagcgagtaaccttcatgcgggaatccaggcgggatatagatgatatcgcccggttccatctcttcgtcgatgatggcgtcaaacggttcaacctgaagaagatcagggtgcggcgtgtgctgtttcatcgggattttttccccaacgcgccagcggcgacggccggtgccctgaatgatgaagacgtcatactggtcgaggtgcgggccaacgccgccgccgggaacagagaaggaaatcatcaggtcgtccatgcgccaatctgggatctggcggaaagggcgcatcaggtgtgaggaaggttcatgccagtggtcgacggcctgaaccaaaatggaccagttattctcgccaaggtggtcatagctttcgaacgggccgtggctaacctgccagcgccctttgtcatggctgaccaggcggctgtcaacttcgttttccatcgccagacccgccagttcatccggggaaatcgggtcgataaagtttttgaaaccacgtttaagcaggaccggacgcttttgccagtagttggcgagaaaatcgtcccagtctaaatcaagttgataatccatgtgtttgttccgcggattgctaaagtctgacatggattataacggaacatcagtgcgctggcgcaggcaatcatcggcaaatttaaactctgacatgtgaatcacacccacaccggcaaaaaactcaggattgatcgctgtcgtactgctgaccgaagcagatgcgcatgctcgcgccgcctaattcgctgtcaccgataaggatcttaccgtcgtactgttcaatgatttcgctcgccagcgacaggccgagaccttgccccggacgcagcgtatctgcccgttggccgcgcttgaagataagctcacgctggttttcagcaatgccaggaccgtcgtcttccaccagaatcactaattcgttttcggtgtgcaccgcgctgatttcgacgaactccagacagtatttgcaggcgttgtcgatgacattgcccagcacctccataaagtcgttcttttcaccgatgaaagtgatttcaggcgagatatcgagcgtcaataccaccccttgcgctgataaaccttattgagcgccgagcaaaggctgtcgagcagcgccgggactgagtggatttcgcggaccagaatcaggtgttcagagcgcagcgttgcgcgatgcaggtaataaccaatctgctgcgagatacgacttatctgctcaagcattatcggttcggccttctctatgctcatctccttgccgttgcgcagcgagcgcagcgtggtttgcagcaccgccagcggtgttttgaggctgtgcgtcaggtcggcgagcgttgtgcgatagcggtcatagcggccgcgttcgctgctgagcagaatattgagattgcgcaccagtccgcgcagctcggagggagtttgctcgtcgagcaggtcgcgctctttggtttcaagctctgccacctggccgattaatgccttgatcggccgcaggctccagtaggctaccagccagagtaagggcaccaccagaagcaggtttgcgagcagcacatagctgaaccactcccacactaaatcggaatgctgcaactcctgcggaatactgtcgatgaccacgatattcagcgcgggcaggcgtgaggttgcggcatagttatttaccgccaccgagtgcgtcattgcggtggcgttagtcccgtcgtaattcttcaactggtcttgcgctttggggttgttacccacgacttcgctggaggtttgcgtgtcggtgtcgaggtcataaaagccgggtttattcagccatgacttgctgatttgtgattccagatcgggtacgcgtcgctgagcccagagcagtttcccgttactgtcgtaaatgaataccagcgtggggaaattgagatcgagatcgggggaacattgatggtcaacttgtcgtcatgccactgcgcgaggctgaagaacaggttactctcgccgcgcagtagccgataggcggtcttgtcgaagctcaccatgtagccgacgacggccactaatccgtaggcgagcgacagcgccagcaccacggcggcggtagccatcatgtagcgggcgcgaagcgaaaacggatttttgcttttggttatcatcggctttagcctcggatatcaaagcgataaccctgacctcgcacggtagtaatgacctcagccggatgttcaacctgcaattttttgcgcagacggcccatcaacacgtcaaccgtgtggctctcgcgcagttcggcgtcagggtacagctgtagcatcaggctgtctttgctcaccacttttccggcgttgcggataagcgtctcgataatggtgtattcgaaggccgtgagttttaccggctgttcattgaccgtcaattcgcggcgtgagaggtcaatgacgaacggcggcagggcgataacctgtgaggctagcccgctgttgcggcgcatcaacgcctgcatgcgcgcaatcacttcttcgaggtggaaaggtttggtcacgtagtcgtcagcaccggcttccagcacggcaaccttgtcctgccagctttcacgtgcggtcagtaccaaaatcggcagtttgacctggtggttacgccagcgttggatcatgctcaggccgtcttcacccggtaaacccaggtcgacgatcgcgatatcaggggcgtgctcttgcagaaaatagtcggcttccttggcgtcttccgcagaatcgacttgattgcccatttcgcgcagctgcacagaaaggtgatggcgcaaaagcgcattatcttcaacgactaaaattcgcataacgttctccgttttcggcaagggctcattatcatcgctacaagataaacctgatatcaaccataagatttaaaatataaacgaaatataaacgagaaaagaaaggcacgctgagttattttttctgaagggaagtaattcaacaggataataaaaaaacgggggagaaaacctgcgttttctccccgttgaacgtaatggtttaaacgattatttaagttcgtcgaccatggtggtggcgcggccgatgtagttggctggcgtcatcgcttttaggcgaactttttcttcttccggcagctcgaggctatcgatgaagactttcatgccttcagcgtcaacgcgtttgccacgggtcagctctttcagcttctcgtagggcttttcgatgccgtagcggcgcatcacggtctgaataggctcagccaatacttcccagttgcggtccagttcaccgaccagatttgcttcgttcacttccagcttgctgatacctttcatggttgcctgataggctatcagcgcatagccgatgcccacgccaaggttacgcagcacggtagagtcggtcaggtcacgctgccagcgagaaaccggcagtttgctcgccaggtggcccagaacggcgttcgccaggcccaggttgccttcggagttttcgaagtcgattgggttaaccttgtgcggcatggttgaagaaccaatctcaccggcaatggttttttgcttgaagtggtttagcgcgatgtaaccccagatatcacgatcgaagtcgatcaggatggtgttaaagcgcgcgatgcagtcgaacaactcggcgatgtagtcatggggttcgatctgcgtggtgtacggattccaggtaatgcccagtgaggtgacgaactcttcgctgaactggtgccagtcaacctctgggtaagccacgatgtgggcattgtagttgccgacggcaccgttgattttgcccagaatttcgacctgctgtagctgcttgacctgacggtccatacggtaggcgacgttggccagctctttaccgatggtagacggggtcgcaggctggccgtgggtgcgggacagcagtggaatgtcgcgatattgcagagccagtgccttgatagaatcaacaattttcaaccagtaaggcagcaccacgtcctgacgtgcggtttgcagcatcagcgcgtgagacaagttgttgatgtcttcagaagtacaggcaaagtgaatgaactcagacacagcgtgcagagccgggatcgctgctactttttctttcaggaaatattccacggccttgacgtcgtggttggtggttttttcgatgtctttgatacgttgcgcatcattttcatcgaaattagccactaactggtcaaggaaagcgtttgcgtcggcatcaaaagcgggaacttctttgatttctgcacaggtggccagtttttgcagccaacgtacttcaacctgcacgcgaaacttcagcagaccaaactcgctgaaaattgtgcgcagcgcgctgactttatcaccgtagcgtccatcaacgggggaaacggctgtcagtgaggataattccatcggtagcaactccaggatcttattaacagtaaaatttcacacctacgtgatacaggtgtggcaaatctgattttcagcaacgagcgagaatggttttcgcttgttcgaacaatcggttacgagaaaacattagctgcagacggccaccgcctacttgctgccaaagtactgctgcgcggatacccgcgagaagcaaggcacggactttagcctgaatctgtgtgttctgcaaaattgccggtgagccgacaacctgaattcttggccccgcagggctgacgatatcgacgtaaatcgaggccagtgagctcattacctgatctgactcgagctcgaaatgcgccagctgacgatcgagctggtcgatacgctgcccgagttgttccatcgaggactttttggcgtgcagcttacgttcgagcaccatcagacttagagtatagcgggtcaactcggcacccagccctgacgatttgcattcagcacgccgagcagggtttcgagccccattttcaggttggcttcgttatttccgtataccgcgagcgttgacgccgggttcatttcgagcaggctgcgcagggagaccatcatctcttctttcgcgcagctgccttcgtgggccaattgttgaacgagacgcgcagactggcacattccggccaaggcgagcgtaatgtcataataatttttggccacggttactcctgtaagcgttattcgacggcaagattctgtgacttttgcgtacgccaaactaatggcgacagatcatgccataaaacgcaggctaaacacagcgccgaaaagcagggaatgcgagtcttagcccgataaaatgggtgagatagcctaaactaggcgctaatcaggaggcgaaacgccagtctgcccacggaatacgtgcagaacctgcttttacgttttcataaaaaaggaataaaagatgaagaagttatggctgcttatactgtgtccgagcgttttgctgaccgctttggccgcccatgccgaggtgccgggaaaggctatcgatcaaaaaattgaggcctgttcaaaaaaggcggtctcgacgctggattcagaggcctgtctgcaacagggctacaccgactgggacaaagagcttaacgtacagtatcaggcgctgctcaaggggcaaccggcggcggttaaaaaggctatcgtccattcacagcgcgactggctgacttatcagaaatcgtattttaacgcgttggacaatttttatcgccagcagcagggaaccgtctggggtatcgtggatgcgcaggccaagctcgattttatccgccacaaggcaattgaattaaatgcttttgcaaggagtctggatttaagtaacgggcagggctaaacccctcaggatttcatgctgcaacggcgttgaaggttctcgttcacccccagtcacttacgggcgtaagcgtctggggatgcattcggttgccgttatcgggtattgcgggacttgataaggcttattgcgtcagcggaatacgctgttcaatcacgccgccgccaaggcagacttcgccctgatagaacacggcggactgacccggggtgacggctgccaccggtgattcgaagcgaacctcgatgcggttgtcatccagaggtgtcaccacgcacggaatatcttcctgacggtaacgggttttcaccacgcagttaaacggcgcggtaatcggctggcgatcgacccagtcaagctgttgggcaatcaggccgaccgacatcagacgcgggtgctcgtgcccctgtgccacataaaggatattgttggcgacgtctttatcgaccacataccacggatcttctccgccgtccttttgtcctccaatcccgaggcctttacgctgacccagcgtgtggtacatcaggccctgatgtttacccatctcttgaccctcgacgcttttaatcacgccaggttgagcaggcagatagcggccgaggaagtcacggaatttacgctcaccgataaaacagatgccggttgaatctttcttcttggccgtgaccagctcttgctcttcggcaatgcgacgaacctctggcttttcaagctcacccaccgggaacaggcttttggcaatctgatggctgcccagcgtataaagaaagtagctctggtccttgttgccgtccagaccgcgcagcagctggctttgaccgtcaacgtcgtgacgacggacgtagtgaccggtggcaatatagtctgcgcccaggtcctcggcagcgaactcgagaaacgctttgaacttaatctctttgttacacagaatatccgggtttggcgtgcgtcctgccttatattcctgcaggaaatgttcgaacacgttgtcccaatactctgccgcaaaattgatggtgtgcagcttgatgcccagtttgtcacttaccgcctgtgcatcggcaagatcggtggctgcggagcaatattcttcatcgtcgtcctcttcccaattcttcataaagagtccctcgacctgatatccctgctgttgcagcaggtaggcagataccgaggagtcgacgccgccggacattccgacgatcacttttttctggctgttgtctgacatagcagttccaaaacatagagtcataacccgttaaacgccgtccacacgaggatgaaggccgcgtgccaacgacgttttgttcggggcataaaaaatagcaggcagaattttatcacgttggccgccttgctgcaccggtgattggtgcgcaagacggagataggacgttagtcgggcaagttgtaattgcctaacagcgccagcgggtagcgcgcgggctgctgatacaggcgaatactctcggcaaccagcggtgagcgcagttctttagcgttgaagatctcgtcggcggtgagccagcggcagccagaaatatcgctatcctgcgggaaagtcggcacgatttccgctaaatcaatcacgaaggtgaaacgcagaaaaggcgtctcatcgggcgcctgccactgatgcaggccgagaaaaaactgcggcgatgcgtcaatgccggtctcctcgaacagctcgcggcgcacggcggtgagcagcgtttcattggcctcgagatgtccggcgggctggttcagcgtcagcctgttgttgatgatttcttcaaccagcaaaaaccgcccctctgcctgcacaacacaagcaacggtgacgttgggtctaaacataaggtatttccttccattgtcccggcgccaggttatcgagcgtcaggtcgcccatgctgtagcggataagtcgtaatgtaggatagccgatgtttgccgtcatgcgacgaacctgacggtttcgaccctcatatagcgtgattttgagccagctggtgggaatgcttttacgctcacgaatcggcggaacacgcgcccatagccactcgggttcgggaacaagctcaatgcctgcggccagcgttttaccatctttaagctccagcccgctgcgaaacgctttcaaagagagggcgtccggctcaccttccacctgcgcgtaatagaccttggccgtccgttttcccggctgggttaacgcagcctggagttgaccgtcgttggtcagcaccaacaggccttcgctgtctctgtccagacgacccgccgcatacacgtcgctcacggggatgaaatccttcaaagtggtacgacctgcctcatcggtgaactgcggcagcacgtcgaatggcttgttgaaaagcaggactttacgctcttttttcaacgaagtgctttcccgatgtggcttggtgctgaaacgtttaacttggtgatttttaaaagggaattttttcatagtcgttgaagtagccgagaattagagcattatacttgaaaattgtttgcgattggcgtcgtgaaaataatcaagtagtattgactcgcatcttacaaatcattaacaaatagtgcgctaaaggagagattaatggaaagcaaagttgttgtccctactgaaggtaccaagattaccgttgatgccaaaggtaaactggttgttccaaataatcctattatcccttttatcgagggtgacggtattggtgttgatgtaacccggcaatgcttaaagttgtcgatgcagctgttcagaaggcttacaacggtgagcgtaaaatttcctggatggaaatttacaccggtgagaaatctgtagagctgtacggccaggacgtgtggctgccgcaggaaacgctggatctgatccgcgaatatcgcgttgctattaaaggtccactgaccactccggtcggcggggtattcgttctttaaacgtcgcacttcgccagcagcttgacctttatatctgcctgcgtcctgtgcgttattacaccggcacgccgagcccggttaaacgccctgaagatattgatatggttatcttccgtgagaactccgaagatatttatgcgggtatcgaatggaaagccggttctgccgaagcggataaagtcattaagttcctgcaagacgagatgggcgtaaacaaaattcgtttccctcatgactgcggcatcggcgtgaagccatgttccgaagagggcactaaacgcctggtacgtgcagcgattgaatacaccatcactaacgatcgtgattcactgacgctggtacacaaaggcaacatcatgaaattcaccgagggtgcgttcaaggattggggttaccagctggctcgcgaagagtttggcggtgagctgatcgacggcggaccttgggttaaaattaagaaccctaacaacggcaaagatatcatcattaaagacgtgattgccgatgcgttcctgcaacagatcctgctgcgtcctgctgaatacgacgtgattgcctgtatgaatctgaacggcgactacatctctgacgccctggcggcgcaggttggcggtatcggtattgcgccggggccaacattggttccgactgtgcgctgtttgaagccacccacggtactgcaccgaaatatgccggtcaggacaaagtgaacccaggctcagtgatcctttctgcggaaatgatgctgcgccacctggagtggttcgaagcggctgacctgattgttaaaggcatggaagcggcgattgccaagaaaaccgtgacctatgatttcgaacgtctgatggaaggcgctaagctgctgaaatgttcagagttcggcgatgcgatgatcgccaatatgtaatttcgggaaaccggaatacataaaaaagggagcctgagggctccctttttattcgcttacagtctgctgtaagcagcccggcagattactgctgtttctgcgcttcggcggccttctcttttttggcttttgccgccatgtggtggccgacgacacagccgccaacggcacctaatacggcgtggtgatgcgcaacgtggcccgcgacagcgccaacggccgcgcctttcaggcagccttcagcgtgagcaaaagtcgttgctgacatcagcgtagcgaaaacgataaagcaacaggaaatcttacgcatagaattatatcccaaaggaaagaatagactcattattaacatgtcataacttccagcctgctgtcatggtgccttctgtaagcaattactgcttatgttacgcattatgtagccttcgagcttgaatatagagcacagaagggaataaaagcctgccgacctttacaattatatgcacggtcctgtcattatttgtgcaggagcgggattggtttaccacagattttgttctaaagtggaataaactgtatgaaattcactcaatatcaccgcaacagttttcactgcgagacaaagaggggtgccgctatgtccaatcaagagcagtttgaggtgctgatggcgcgtattgacgcgctggaagagcgcgaaaaacaacttacctatgcatcgaatgcttatcaggcaatcctgaccacgctactgggcaatcttgataaaaccacgcgtgacaaggtgatccatatggtcgatcaagcccatgatatcgcctatgccagagccaatatcgagcagaaaggcaatatcctcggggccgatgatattacccagcgcattttcctgtttgctcaagggcgtgcgtctcaatcccgctaacctggacaagacagcgctgctttaccctttagcatcaacaggctatgagcgcctgtctgcttttagcaggttaaccgcagccccaatcaagatacgctgctgaacgcccgcagtgctcagtttatgttccagataatcaattaacgaatctgccgtgaggggctcgccgcgatggcgtagctcaatcactccctcaccaataatgcgagcaacttcgtcccaaaggggttggatctcgctttccgagaattgcataaggcctcccgtctgtacgaatgatgttcaatttatcatctgagacaccggtggcaaggcctattcggcgaacagttggggcggattatcggcaacatcgaggggaatttagaaatgagccccgcctttcagggagttggcggggctttttagtctgagtagaatctaaaatcagtgtttaatcacatacaaattttttgcaaaaacccttccctgcggatcgtggtcatcaaagccgccgatataaggcttaaccagcttggcgctgacatagtgataaagcggaaccaccggggcctgagtattcagaatatcctcagccttctgatagtccttttgtacctgatctttgctggtggccgccagcgcatcgtcgagcaccttatcatagtcggcgtcgtggaatttcggggtattctcgctgttatcactgcggaaagtattcaggaaggtcgagggttcattatagtcggctatccatgcataacgcaccacgtcgtagttaccctgatgcatggtatccagcatggtcttccattcctgattctgcaacactgccgtcacgcccagatttttcttccacattgaggcggctgcaatcgcgatgtgctggtgtgattcgctagtgttataaagcagattgaatttcagaggatgctgtggaccaaatccggcctcggctaacagcttgcgggcctcggcgttacgctgatcctgcgtcatattggcgacagccggtaatttgaaagtgtagccgcccgtattatctggggtaatggtatacgccgccgtttggccttgacccaacactttatccgcgatgatgccgcggtctattcccagactcaacgcctgacgtacacggacgtcgttaaatggcggtttctgattattaaacgcgtagtaatagaccccgaggtaagggctggtgtgaacctgcgaacccagctctttcttcagtgaggcaaactgaacttcaggaatggtcagggtaatatcaatctcaccggccttgtaacggttgacgtctgcggcacctgaagcaatgggcaagtaagtgacctgtgaaagaacggtatgcgcattatcccagtaattcgggttgcgctcggcgaccacgcgctcatttactgtccagcttttgagcttgaaaggcccgctgctgaccagattacccggctgcgtccatttatcgccatacttctcaacgtcggcctgactgaccgggaacagagaatagtgtgagatcatctgcaggaagtaggacatcggacggtcgagctcaacctgcacggtctgcgcatctagcgccttgacgccgagcctgtcgggcgacgttttacctgcgataatgctgtcggcgttcaacacgtgcaccgtgccaaggtagctttcataaggggagacggttttgggatcgataagacgtcgccagctgtaaaccacatcctgcgcagtaatcggtgagccgtccgaccagcgtaatcccggacgtaaatgaaacacccaggttttattatctttggtgtcccagcttgccgctaattcagggcgcggattaccgttatcatcgatgctgaccaatccgacaaacaggtcgctcaagatgttgctttccacactgctttcggctttatgaacgtccagggtggcaggttcagaaccattgttacgcacaatttcctgtttttgagcaagcacgacgccctgaggtacggtggctgcctgagccattagcggagataaacaaaagcctgaaaccaacagtacaagaggaagtcgttttccgaaggtgttgcttctttgcatcgctattttcctatttcaattaatatattaaatatcaatgaataacaggtaattgatagcgctattgctaagaataatcaacgtttaatgattggatttgcgttaacggcgcttaagttttaaaaatcagcatgggaatgagcagggatccagtcgccatcgataaactcttcaatgggataacaccctgcctgatgcagcccctgttggcgcatggcgatgtggcattgctgaactgtatcaaaggcatcgaccaccatatcgtcgcatccaccacccagataacatactgtgagaaccagtgcgaacatcattgcctcctctgcaatttacctcattaagcatagaagctctgatgaaattcaacagcgacgtgttatcctttgcgccgaattttttacgcttaaattgagtaccgaggagttacggggatgtcagagagcttatctaaagagcaggaacttgagtcagatttggttgcgtgccagctggttattaaacaaattctggacgttattgacgttatcgcgccgaccgaagtgcgtgacaaaatgtctcaccaactgaaaagtatcgattttagcacccatcctgccggtgccgatcctgttactcgtcgtgcgattgagaaagcgatttcgctgattgagctcaagtttaccaagcacgacagctaagaaagaagaagtgtggttataacccgcagaaaactgcgggttattctctattttacaggatgttatgacttatctaccacctcgctgacctgtttcagaatcgggcattttgctacgccaacgataccactgtcagagtggagatactgcgaatcaacaattccgcgtgccgtcaaatattggcatttaagtcccagtcccgctgcattttcactgctgcctacggttaccccatagcctgaaaacaggaaaacagcataaatcaccgccagtacgattattgttttaatgacgcccatttcttacactccctttatggcttaagccgacactgagtataatcgtatactgctctgcaacgcttctctaattctctgaaaaaaatcatgaaaaaaaggatcgtcagatgcattaaaacggctaatgagttcattgggactgctccgttttaatattgtttaacttatacagagtaggataggttatgttttacttcctttcggacgcagatattgggcagcaataagcgcgtgataaatcctaagagatctgccataaaactgaaaaaacccattttttctgtcaggagaatcgctgctttcatcgttttcctgctgctctgtattgggctttatctactggcacttaacagctattgcgatcaaggcggtaacttcgatctcggatttgttcagtgacctcatttattccctggtagtgccaaaagcctgtcagaagcttctgtttttttgtgaataccttccctgtacagcagacgatgataagatactcgtctggttaatcacgttgtagggttgtcaatgttcgatcaagtaattggccaatctggtctggccccaatagtgctaagcctcttgggcgcactgttatttttactggtatggtttgttgtcaaccgttccagtgtcaaagcgaatcaacaggtgcagctgctgactgaaattgccgatcagcaacgccgtcaaaccgaactgctggagcagttagtcaaagcgcaaggtcagggttctctggagaacaacgatgacgactctgcgtatagcctcaagggcttcatcccggaaagataatcatatcgttcgaaaaataacgggttgaaagaagaaaccgctctcaacaggcggttttttcgttcataaaagtgtcttatttctgctgtaacttgttcaataacaactcagcaggatgattaccagatgattaaatggtctgaagaacacgacaacgaactgaatcacaacatcgctttactgactggagaagatccagataaatggtatccctacggcggtgtgaaaggaaaagactactgcaacaaccctccgacgcttggccgattatctgcgccaataaaataagccttaatttcaatgaattgccagatagtaaagactggtctgcgcagatttcaagcgccgaaggccaatggcaggcccgttgcgccaggccactccgtgcggcaatgatttgtttcttgttaagtaagacttgcgcgtaacaaaaagcgcagagatactcattctgttacaagctatatacaaagcagtgattcgaataagcatcgcataaagcgatgcgtatcaagtgattaatgtttcctcattttgacagtagtgtctaaggcggagtccattatgaagcgcatcattaaaggtgataaaactctctctcatctggtcgtggctcatgcagccatagacagtcatgaaaaagccttcggtaaaagacgccagggctggccctcaacttacctgatcaaatacaaagacacgcgtgttgccgtagaagtcgttacgcgcaggcagtcttacgttgcgacattaatgattggagcccgaaaccttaccaagctttgtgggatggcagcctgagtccaggctggcagtgtaggcatctgactaacctgtttttgtaatagccgcaaaccccgccgacgcttaacctcgtcggcggggtttttttgcctgagtatcgcttaaaaattcctgacattagcttaagtggctttacatacaccgtcttgcactttttgtagtgaaaacctccaaacctttatgctactaaagagaaagaggttggttttttatcaacttttcctacaaaaaatttatcgataagggaaatcatggccgaaaaaaatccctattatgatcctgcaaaacctcaccatacgccgtacggatttactaatcctgaacccgaaacgcgaaaagagggagatctcaaacgctggcgtcaggagcgcaaaaagcagggatttccgcgtccgcctggcagggatatgagcagttcattcgcgagtggtgccagaaacccgattttagcgggaccgaagacagactgtggtttttggggcacgcctgcctgctgctgcgtgtagcaggtcgctatattctgaccgatcccgcgctgtctgaacgtgcttcgccgctgagtttttatggcccgaaacgtaagacgcctgccgcagtgacggtggccgatttaccggtgatcgactatgtcctcatctcccataatcactacgatcatctggataaatcgaccattcgcaagctggtcaaacgtttcccacaaagtatctttatggtgccgctgggcatgaaaccctggctggaacgccaggggctcattacatcgaagaaatggactggtgggacgcattggtgcttgacggggtgagcttccatgcggtacccgcacgacactggagtatgcgcacgccgtgggaccgcaatcgctcgctgtggtgtggatgggtggtaaaacaccatgagctaaacttctatttttccggtgacagcgcctacagcgaccagtttgccgagattggcgaacgtctggggccctttgatattgcggcaattccgattggcgcctatgcaccaagatggttcatgcattctcatcacatggacccgcagcaggccgtacaggtgttcaaggaaacgaaatgtcatcgtgccgtccccatacattgggggtatttgaattggccgatgagtctctcgatgaaccgccaaaggaattacgtgtcgcgattgaagagggcggtctcagcggtgaaaatttcgcgccgctaaaaataggcgaacatatttcgctgtaaaaatgtgggcgttttattttcttacctgtaggaaatagcgccttcatttcttcaaacgagatattttttcatgccaaaactagtcgagatttcccgtcgcttaccgattcttgtataaatgattaacattttgtttactttattgcttcacatttgatgatagtcatagttccgctattcagaacaatgggttgttaagtctcgttattgccattctttccaaacataatttgattttccccatggcgtttagaggatttcacctttgtcactctgcccactgagcgggagcttccccgtaagctgctccggctctggggtcccgcgtgcttgggtgatgaaggatgagaaaatgtgtgccgggcgtagaacaaaaaccgcaaaataatgaggggaaataatagaaatgcagcatggctcacggttattctaaatttaaatattgaaatagctatgcgttaatttgaatatgccgtctgatttttgtgcaaatgctttaatataaaattcactggcctgtaaatctcatgcagtataagggttattgcaaagtgcttatttattgatccggatcaaaaaagttctctttgacgaattttattacattcttgatctcctatttccgcattctaaatgcgcacgctaaaggtgcagtagaatagagtgcagcaattgttttgcaccacagtagtactctactgcctgttttgacgagtagttatacaatcaatttctttagaagcctgtacatcctttgtgcaattgcacggcttcgccgtaacgcctctttgacgggcgcgccgggctaacaatgtgtaagagaaccctgctatgactgaagagggcgagttgaaatcaggttttaatttgccaccagaagtgttgaaaaacttgcgtaaaatcgatttgtgttatatcaaatacaataatgattcaattaaagctgatttttagtcttacggtttagcgtttattgatcaatactctagtttgagtggttatagatttgattgtcagccctgctttgttgaaagcagaaaatagcagacctatcaacctattttcgccttacttaacagtaagtgcgattaaccggctcaaatatgtgcgacaagtccatcgctgattaaaaatggcttgccattgaattcagagtatgtgataacgcatctgggtaaaacgaggtacagttctgtatatgtgtggcattttcagtaaagaagttttgagtaaagacgttatcgttgaataccgcttctctgccgatttttatcttggtgcctcaagcagtaacgactcaagtttgtctgtgtaacgccgcagggcggtttaaacaatccaaaggaaatactcaaaatggcaaagatcaaaggtcaagttaagtggttcaacgagtctaaaggtttcggtttcatcactccagctgacggcagcaaagacgtgttcgtacacttctctgcaatccagggtaacggtttcaaaaccctggctgaaggccagaacgttgagttcgaaatccaagatggccagaaaggcccatctgcagttaacgtaactgcaatctaagcagcgttagctgtaaaaaaaacccgccaatgtgcgggttttttgtttttgtcccctgcacatttacgcaggcaggatgagaatacctgattgttggttacggccactgatgcctggaatctgagggtctctcgcgcgctgtaggctgttgcgacgaaagctggtgtatttgaatttcggtgctgacagctcatggcgcggattttgagtacaaagggtacagctgcccgcaaagtctactgcggagaatccggcctgggtcagtttggcaaacgcaatggcgggcagatccagatggcggtaagagggtgaaatcaacgtcggcggtaaatccaggccacgcctaaactcaatcaccagttcctcgctcacctcatagcagcacgcccctatggcagggccaatagatgccacccaatcctgcgtattactctgctgattaatgcgagcggccatctgctcaatgattccattgagcagtccgcgccagcctgcatggactacggcaaccgcctttccctgacgatggctgaagactatcggcaaacaatcggcggtaaagacggtaagcagaattcccggctgttcggtatagaatccgtctgcctccccacaggcctgctgcggctgcatcacatcgacaattctgacgccatgcacctgttttttttcgggcagggtagcgctatatggctggagcgattcgggtaataacgcttctttactgccaaaaccgtgcctgacggcgggaatttggctgagcagggtagacatatcactcatgacatcacttttggttaaaaacatcggttaatgggaaagattcagaaagcgcgtcaaagcagtgtattagcctcgcaggccgctgaccatcgcattttcatctatgtccccgcccgataagggcaaaagttgcaactggcagtcggcttctttagacttagcgccagcaaccctgcaagacaccggcgtgtcactattcccggtcttcacctttctggaaacctgcatgacctatcaatgtcctctttgtcatctccctttgcaacgccttgataaacaatggcgctgtgagaataatcatcagttcgacaatgccaaagagggatacgtcaacctgctcccggtccaacacaagcgttcgaagcagcctggcgatagcgccgaaatgatgctctcacggcgaacctttcttgaaggaggccactatcagccgctgcgggataggctggtggcgctgctcaatgagcatctggggagcgatgccgacgcgctgctggatatcggctgtggggaagggtattacacctcggcgatagagcaggggctcaatgccagccgcaagatgcaggtctacggtcttgatgtctcgaaggtcgccattcgctatgcggcaaaacgctatcaccaggtcgaattttgcgtggcctcgagccatcgtctgcctttcgccgacgactctctggacgccattgtgcgcatctacgccccctgcaaggcccctgagctgcatcgtgtgctgaaatcctctgggctggtgcttaccgttgcaccggggccaaggcatctgtatcagctgaaggcgtgcatttatgccgacgttcagcttcacagcgacgccgaagagagtctcgaaggttttgaacgcatcagcaccgagtcgctcggctatgagatggcccttgatggcaagcaggcgtttgatttattgcagatgactccctttgcatggcgcgccacagaagcgttgatgcagagtctttctcagcgcgaagcctttgcctgcgaaacggactttgtaattagcctgtttcgtcgcaaagacgaggtagacgcttaaaggttattcgagagtcagtcaggcggagagtccgcctgatttcaatgaatgttggggggtaacagccttactggaagttaaccatcagcttgtaaattctctcaaggtcgtctaactcgcgaaccctcaccagcagtttcttctgttcgagctgaatcaccaaaatcccgtcttcagacagattcatcgccttgattctgtcataggcgataaagatattggcgtaaaagaatccgcccgctttgaacaacatcttgggccagcgaataaaggagttataaaacgcaatcagggccagactaatgagcaaataggtggtcacggtactgccgtgggcattcaggttgttatagagcaaaatggccagtagcccgataaagataatcgcatcaagcttgtttctacgctgtagcttaaccctaagcagggtttctcccttctgtttgtccatgatgaattcatcataaatcgcatacgccagcagaaaaataataaaaatgatcaacgcaatatctgtgaccgacatccctttctcccaataaaaaaccgggggctttgaaacccccggtggatgttcagcgcttagcgacccagcaggccaatccaataaccgaaaatacccagtacgaagaagcccatgataatccacagcgcattgactttcttacgcagcagccacatacagccgaaggtcagcagcagcggcaccaagccaggcatcagctgatcgagaatgccctgaaccgtggtcaccgttgtttgcccggtatggtcggtaattttggacaccactaacggaatgtttacgtgggtccacttattgaccaatgcccccatgacaaagaggccgagaatggacgccccctcggtcagtttttgcaggaagccgccgcccatatcgctaacgatatcgacccctttcttgtagccgtatgccacgccgtaataacggttaagcaggcgaaccaggttgaacaggaagaagaacagcagcgggccaagcaggctgccactcattgcaattcccgcgccaagcgctgcaaataccggacgcaccgtccccagaagatagggtcacctacgccagccagcggccccatcaaaccgactttcaggccgttaatggccgcgtcgtcgataggtgcgccgttggcacgctgttcttccatcgccagcgttacccccaatactggggcggcgacgtaagggtgggtgttaaagaactccaggtggcgtttaatcgcctgtttgcgatcgtcgttgttttcaggataaagacgacgaatgaccggcaccatacagaagcagaagcccagtgcctgcatacgttcgaagttccatgaaccctggaacaggttggagcgtagaaacacaccgcgaatatcgccaggcgtgagtttttttacttgagtttgatcaaccatttctctcacccttagtccaattcgttgtcgaggtcgttaacgccatgagccggtccggcagcctgtgaagacttgttgtattttggactcagctggatataaagcactgccatcaccacgccgattacgcccagcgcaaccaggttgaagttggtgaatgcggcggtcacgaagcccagatagaagaaaggcatcaggtagccagcacgcatcatgttgataaccatggcgtaaccaacaaccacaatcatgccaccggcgatgttaagaccgctggttaccacttcagggattgagttcagcatgctttgaaccacgctggtaccgactgaaaccgctacaatcgccgcagggatagcgatacgcatcgcctgcagaatcaacgcggagacgtgtatccaggaaatcgcactgagattccccttttcggcagccttgtcggcggcgtgctggaaggcgacggtaatggtacggacgatgatggttaatacctgaccggcggcggccagcggaatagccagcgcgataccggcaccaatcgactgcccacctgcaataaccagaatggtagagatgattgaggcgagggcagcatctggtgcaacggcagcaccgatgttcatccagcctaaggcgatcatttccagcgtaccccgataatgatcccggttttcatatctccgagaacaatacctatcaaggtacaggcgacgagcggacggtgaaactgaaattcatcgaggatggattccatccctgcaatacatgcgacaataaatatcagcacaatttgtagtgtggtgatctccattgaccttctcctaattcatcttgttaatcaaatccatcatcttcacacggctgtctgaagacactttgcgcacttcgagttcgatacctttttcatttaatttcttaaatgcttcgatatctttctgatcaacggagacggcattggtgacctgggttttcccctgtttaaaggccatgccaccaatgttgatcgacgtgactttgactccgccttctaccacacgcaggacgtcggtaggattggtgaagagcagcatcacgcgatcgctggcatatttcgggttgtcatagacgcgaatggccttagcaacatcaaccacgtgggcggtgacaccgggaggggcaacctgggtcagcaacgttttgcgcacggtgtcggcggcgacttcatcgctgacgacgataatgcggttaacgttggtttccttggtccagcgggtcgcgacctggccgtggatcaaacggtcatcgatgcggacaaggccgattttcatgtggtcattcgggccgagggctttggctggcgcggcaggtttagcagccaccggggcagtaacgggtttttcagcgtgggcttccggttcgacaaacttcagcgctctgacgccaagacggccggtttccagcgcaatgcttgtcagttcactgagggatgggttgtcgtcgcgtcccataaaggtttcgaccaacatagggacgttaacgccggtaacgacttcgtagttttcgcgatcaacgcagatacggttagcggcgttgaacgggctgccgccccaggtatcaaccagaaacagaacgccgctgctggtgtcgagatgttcaagttttacattatatttttcaaacagtgtatcggcattttcccctgggacgaagtcgataaaggcgacgttttcttggtcgcctattaacatttccgtcgtctttagcagctgttcagccgccaaaccatgagtgccgatgataatagctatactcacctgctacctcctcttgtgacccgctttgcgagtcctgcacttagtgataaagcttttttaattcgccaacagattcccttgacgaatgctgtgttccctacattattttttgagttaaaaaaactctctaatccttttgtttctgaaaaatcaataaccaaacatcgaaaaaatctgtcgaaagtatcgactggatttattttagtgtgtgaaaaaataaattttgtgacccctgtctgctattcagagacgaattaccccgcgttaaccctgttttcacgatttaaatgatttaccgcataaaacaacattgagcataggcagggatgaagggacctgctctaaaagacgcttttctaaaacaaatagacctgttacattgtatttccaattattacacaggagtgccgggcatcagcccaccctatggactgtcaccgaagacgtttaaccgcatttgaatcctcagcattatcaactccccataaagcaacacacctcagtcatggccgctgcgccgaatttcggagactgcaatggaattcttaatggatccttcgatttgggtcggcctgttgacgcttatcgttctggaaatcgtgctggggatcgacaacctggtatttatcgctattttggccgacaaactgccgccgaaacagcgcgacaaggcgagaatcattggcttatcactggcgctggtgatgcgcttgggcctgctttcgcttatctcttggatggtgaaactgacgacgccgctgtttagcatcgcgcaatttaccttttcggggcgcgatcttatcctgctggtcggggggctgttcctgttgtttaaagcgaccagcgagctgcatgagcggctggaaggccacaatgggttaggaagtaataatcgcggctattccggattttgggccgtagtggcacagatagtggtgcttgacgccgtattctcgctcgacgcagtgattaccgccgtcggcatggtgaataacctcgcggttatgatgaccgccgttgtcatcgcgatgggcgtgatgctgctggcctctaaaacgctaacgcgtttcgttaacgcgcatcctacggtggttgtcctgtgcctcagcttcctgctaatgatcggcttgagcctgatagccgaaggtttcggtttccatattccgaaaggttatctgtatgcggcgatcggattctcggtattgatcgagttgttcaaccagattgcgcgcagaaactttattaagcatcagtcagatcgaccgctgcgcgaacgcaccgctgaagctattttccgcatgatgggtggaaaacgcgacagcgacgtgcagcaagaagacgcacacgataccgctgagccgaaacaagaaaccttcgccgaagaagagcgcttcatgataagcggtgtactgacgcttgcctcacgaacgctgcgcagcatcatgacaccgcgtaacgacatttcttgggtagactgcgaacgctctcccgacgagattcgacgacaattgctggacacgccgcacagcctgttcccaatttgccgtcagtcgctggacgacgtgataggcgtggtgcgggcgaaagacttgctggtggcgctggaaaacggtgaagacattgttgccttcgcggagaaaacgccgccgatcgtggtgcccgaaaccatggacgtcatcaagctgctggccgtgctgcgtcgtgccaaggggcgtctggtcgtcgtgagcaacgagtttggtgtcattcaagggctggtgacgccgctcgacgtgcttgaggctatcgccggtgaattccctgacgaagacgaaacgccggatgtcgtggtagacggcgacggctggatggcgaagggcggtaccgaccttcattcgctggaacagctgctcaacacctatgagctggtgagtccaaacgccgattacgcgacccttgccggactgctgttgtccgaatccggtcagatgccgttcgaaggcgaagttatcgagatgcctccgctgcgcttcgaggtgatcgaggtctctgaatatcgcatcgaacgtgtgcgtattaccaagatatcgtccaacgagatgcgtgatgaagaagagtaatccgtaatcagaatagaaaagggcaggcttcttatcgaaacctgccctttttttgtgagtaaaatatcactcagcctttagtcacactgtaccttgatagccagaccgccgcgtgaggtctcacgatacttggcgttcatgtccttgccggtctcgtacatcgtttcaataactttatccagcgagacgcgcggttcactggtacgacgcagcgccatgcgcgccgagttgatggctttcaccgaggcgatcgcgttacgttcgatgcatggaacctgaacttgcccggcgaccggatcacaggtcagacccaggttatgttccatgccaatttcagccgctacacacacctgctccgggctgccgccaagcagttcggtaagacccgctgctgccatcgagcatgccacaccgacctctccctgacagccaacttccgcacccgaaatcgaggcgttcatcttgtaaaggatgccgatggcgcccgaggtcaggaaataacgctggtaaatgtctgggctgaccgagccaatgaacttgtcatagtaggccagcaccgcaggaacgatgccgcaggccccgttggtcggtgccgtgaccacgcggccaccggcggcattttcttcgttgactgccagcgcgaacatattgacccagtcaataacgtgcatggggtcattcgacagtttgtcattcgacaccagcatgcggcgcagcgccgaggcacgacgtggaacgcgaagcggacccggcaacacgccttcggtattgaggccgcggtcgatacacgcctgcatggtgtgccagattgactcgaaatacttgtcgatttcggctttgctgtgctgcgccagctcattcttcatcatcagtcccgacaatgagaggcccgtttcacggcatttttgcagcatttcgctggccgaatcgaaggcgtaaggcacgctgacttcgtccagtaccggctgaccaaaatgctcgtcgtcgacgataaaacccccgccgaccgaataataggttttgctataaaccatctgctcgccaacgaacgcgtgaatctgcatgccgttttcatggcgcggcaggttttcaccgcggaataccataccggtatcacgcgggaaatctacctcgtggtgggtatcgccaataggcaggcgctggcgttgctcaacgtctttgataaagtgtggaatggcgtcgatgtcgaccgtatccggcctgttaccggcgaggcccagaataatcgccacgtcggtatggtgacctttaccggtcagagataatgaaccatagacgtcgaccgcgatgcgggtcacgttaggcaacaggtttttttccaacagatcatcggcgaattgtttgccggctttcattgggccgagcgtatgggaactggacgggccaatacccaccttgaacatgtcgaaaacactgatcacttaaaggctcctgatagaagcaaatcggctgcaggtgaatcttgggtggccaaatttgcacaagctttgtttatttattgttcggttgttagcgttatagtgtaaaagggtgtgaaggattacacagcggttttcgcatgaaaaaaagtaattcatcgcataagtgtgaagtgggtgaggagcgggatcacaactcgtcgtcagttgcctatctgtttagccagctgaagaatgatcccggcggtcattccccacacaaattgctcctcataccaggataaatacactcgacgacgaacgcctgcgcgctgaaaatccagcggatgatagcgcgcaaagttaagcgcctcctgcaacggaatttcgaacagctctgccacttcgtcttcattggggtgtaacggcacatcgaccggaatcaatcccaccaccggcgtcacctgaaacccgctgctactgtcgaccggctgcatctggcccagtacgcgcacgcaagagggggaatggcgacctcttcctgcgcctcgcgcagcgcggtgaaaataagcgaagggtcggacgcgtccgccttgccgcccggaaacgccacctgacccgcatgcttgcgtaaattgtcggatcggcgggtcagcaacagggtgggctgctcgcggcagacgatcgggatcagcaccgcagcctgtcgtcgtccaacggccttgcgcaccggcgtggtgggcaaattcagctgaaactggcgaacaaatcgctcaacgtctggcggtaaaggttgaggactgaagtccatcatggcgcgatatcctcaccgagcagcggcagaatgcgcgccactttatcgaaggtttcctgatattccgcttgctcctgactgtcggcgacgatgccgccaccggcccagcagaacagttcgcctttttcggccagcagagtgcggatagtgatattgctgtccatcgtaccgcaacagctgatgtagacgatgctgccgcagtagccgttacggcgctgtggctccaactgctcgataatctgcattgccctgattttcggtgcaccagtgatagacccgccggggaaacatgcgcgcagcaggctcgccggatgacaggcgttgggcaggcgagcagtaatagtgctcaccaggtgatgcacggcgggaagggttcgaccacaaacagctcaggcacttttacgctgccggggtggcaacacggccaatatcattacgcaagagatcgacgatcatcaggttctcggcgcgatctttagctgaagatctcagcttttcggcctgaagtcggtcgagaagcggatcctcatggcgcggcattgtacccttgatcggacgggtctggatcctgtcttcttccagccagataaaacgctcgggcgaaaggctcaacacggcgttttctggcagacgcaggaacgccgagaacggcgcacggttagtctggttcaggcgtagaaatgcctgccattcatcgccctgatattgggctttaaagcgctgagtcaggttgatttgatagcagtcgccgctgtgcaaatattcctgtatctggcgaaatttatcaccgtaggcttcgcgggtcatgttcgactgccacggcgaagtcagctggaaaggctcggtgggcagcgtttgttgatgctgctcgagccacgtaaggcgggtgtggatatctccctgactcaccagcgtcagccgctgtaaatggtgatcggcaatcagcgcccagctgtaaatccctatcgccatatccggcagagcaatgtcaggctccgccagcgacggcaacttttcaatcctgcggcctaaatcgtagcccagcagccctaacgcgccaccctgaaaagggaagtcggcgttaacttctgcccgcattccgctggcctcaagctcctgttgtaacagctggaatgggtccgcctcgctaatttccgccgccatgcccgaggcgtcttttcggcagatttcagtatgcagcccgcgcgtggtcagcgtgacctgcgggtcggcgaccaaaatgtcgaagcggttgtggacatggtcggcagcgccggagtgcagcagcatggcccaaggcagtgacgacagggaggcaaagcgcgtgagcagcgcatcaggttgataatctaatttataaaaatcaatggattgaacggatggcatagtattttgaaaattcccgacacggtgacaatgcaattcctggcgaaccgatcctagcatagatttgatgtgggtaggtcattggcaaattaaggcgtataatgtgcggctaagctcgcttcactatagaaatagaacaggaacacattcatgttgaccggtatgccttcactttcgcactcagagcagcagcaagccgctgaccgtatccgccagttaatggaagaggggatgagcagtggtcaggcgattgccgtggttgcggcagagattcgtgaaacccacaagggtgaccgtgtgacggttatctttgacgatgaagacgaagaataagccttactgaatatttggccgttgcacatcaactgcacaacggccagaagccaggcgttaacccttaacgaccacggctgctgctgccttgattgcagtttcaaccgcttgctcaatggtatcgccgattgacagcgcaacacccagacgacgttttccgctgatttccggcttgccaaacaagcgcacctgattagaacccactaaagcctgctccaaaccgctgaagctaacgttgttgctggtcagttccggcaggatgacggcagaagccgagggaccgaactggcggatagtgccgattggcagcccgaggaacgcgcgcacgtgcagcgcaaactcagacaggtcctgagaaatcagcgttaccatgccagtatcgtgtgggcgaggagacacttcgctgaacaccacgtcatcaccgcaaacgaacagctcaacgccaaacagcccgtgtccacccagtgcttccaccacgttttttgcgatatctttcgcacgctcgagcgccagactgctcatctgctgtggctgccatgattcgcggtaatcgccgtcttcctgacgatggccaataggggcgcagaagtgaataccgtcaatggcgctgatagtcagcagggtaatctcgaaatcaaacttcaccagaccttcaacgatgacccgcccccgcctgcgcggccgccaagctgcgcatagtcccacgcggcctgcaacgtttctccactgcggatcagactctggcctttaccggaagagctcatgaccggcttgatgatgcacggataaccaatttcctgcactgcctgtttgaagctggcttcatcatcggcaaaacggtaggtcgaggttggcagtttcagcgtctcggccgccagacgacggatgccttcacggttcatggtcaggcgcgttgcttcggcgcatggcaccacgttatgaccctgcttttccagctcaaccagcatactggtagcaatagcttcaatttccgggacgataaagtcagggcgctctttctcgataagctgcttgagcgcctcgccgtccagcatgttgatcacatggctgcggtgggcaacctgcattgcaggcgcgtcggcgtatctgtcgacggcgatcacttccagaccaagacgttggcattcaatagccacctctttgcccagttcgccagagcccaataacatgacgcgggtcgcgtcggtgcgcagtgcagttccaatggttaacatagctggatacctaactcgttgtcggtgatgaaaatatcggtcgtaaaatcgcgttttgggcacccattctgcgtggcagattgcggtgacagaggacgttgcgaaaatagttggcggcattatataggaaaaagtctcaccacgaaaacgattgcgcacctgcgccagtatttgcgtgcggggcgcgaatgtgcgttaatagtcgggcattcgcgatcgaggcggatgctttttgaatagtaaaggatagtaaaatgagtaagttaaacggtcaggtaaaatggttcaacgaaagcaaaggcttcggtttcatcactccagctgatggctctaaagacgttttcgttcacttctctgcaatcaacagcgatggtttcaaaaccctggctgaaggtcagaacgtagagttcaccattcaagacagcccacgtggcccgtctgctgccaacgtcgtcgctctgtaatcagtcacttctggcttacttaagccaactgatcattagataacgattttctaaaacccgcctgcgttgcgggtttttttgactccagtcattagcgctaaggcgcaatatccccttctctgttattatctaaagcattacatggcgctgatagccttgcgccgcttcgtttttttcgccttacataagagttatcgccttgagcacgcattctttctccacactgactttgccatccgaacaaatttctaacctcgaagaactgggctacgcccaaatgacgccaattcaggaagcctctttgcctgccatcctgctaggtcaggacgtgcgcgcgaaagccaagaccggcagtggcaagaccgctgcgtttggtatcgggctgttagataaaattactgtaggcgatttcttctgccaggcgctggtgctgtgcccaacgcgtgaactggcggatcaggtcagtaaagagctgcgtcgtctggcgcgtttcacccaaaacatcaaaatcctgaccctgtgcggcggccagccgattgggccacagcttgactctctggtgcaccagccgcacatcgtggtgggtacgccgggccgtattcaggaacatctgcgcaaaggcaccctgaagcttgaccagatgaaagtgctggtgctcgatgaagctgaccgcatgctggatatgggctttagcgaagatatcgaagacgtggtgagctatacgccgccgtctcgccagacgctgctgttctccgcgacctatccggaaggcatcgagcgcatcagcaataaattccagcgtcagccgctgaacgtggaaatagagggtggcgaagacgttgccgacatcgaacaggtatttatcgaagccgaccgccacagccgtttgtcgctgctgactgcggtgctttatcagtatcagccgacctcgtgcgtggttttctgtaacaccaaacgcgattgccagcagattgccgatacgctggccagcaagggcattagcgtactggcgttgaacggcgacctcgagcagcgcgaccgcgaccgcgttctggtgcgtttctccaacggcagctgccgcgtattggttgccaccgacgttgccgcccgtggtcttgacatcaaacagctgggactggtcatcaactacgaactgtcgttcgaccctgaagtgcacgttcaccgagtgggccgtaccggtcgtgcaggtaccagcggtgtggcggtgagtctggttacgccgcaggaaatggtccgcgttcatgcgctcgaagactatatgcgcaaaagcttcaaatggcagcctgctgctcagagtctctctgcccctgccgcgacgctggaacccgagatgctgacgttgtgcatcgacggtggccgtaaagccaagattcgtccgggtgatattctgggcgcgctgaccggtgatgcgggtttaaccgccgccgaagtgggcaaaatcgacatgttcccgattcatgcctatgttgctattcgcaaaaacagcgccaagaaagcctgcaacgcctgcaggaaggcaaaattaaaggcaagagctgcaaggccttcttactgcgctaagtgaaattgaggagagaaactcgacaatgatgattccgccaaaggctgaaaagcgtccgtatcctatgactacgcacggcgacacgcgcgtagacgattactattggctgcgcgacgatgagcgcagcgatgaagacgtactgaattatcttcaggcggaaaatgcctggacagaacaggcgatgaagccgcatcaggcactgcgtgaagccttgtatcaggagatggttgaccgcattcctcagcaggatcactccgttccttacgtgaagcacggctatcgttatcagacgcgctacgagccgggcaacgagtatgctatctacctgcgtcaaccggcggccgagagcgaaaactggcaaacgctgatcgacggcaacgagcgcgccgccgaccgtgagttctataccctcggtggccttgacgtgagccctgataatacgcaactgctggtggcggaagattttctgtcgcgccgtcagtacgatattcgcgtcaagagcctgctggatgacagctggtctgaggaagttctgagtaatacctcaggaagtgccgagtgggccaacgactcaaagaccattttctacgtgcgcaagcacaagaccacgctgctgccttatcaggtttatcgtcatcaggttggcactgatcctgagcaggacgtgctggtttacgaagagaaagacgacaccttctacgtcggcctcgacaaaaccacctctgagcgatacatcattattcacctcgacagcacaacgacctcagaagtgctgctgctggacgccgataacccgctggccgagccacagctgtttgccccgcgcaggaaagatcatgaatacgcgctggatcattatcagggccatttctatattcgctccaataaagacggcaaaaacttcggcctgtacaagagcgacagctttgcagaggccgactggcagacgcttatccctgcacgtgacgatgtgatgctcgagggtttcagcctgtttcgcgactggctggttatcgaagaacgtcaggaggggctgacccacctgcgtcagattcactggcagagcggcgaggagaaatcgctgaagtttgacgatccgacctacgtgacttggctttcctacaatccaacgcctgatacgtcactgctgcgctacggttattcgtcgatgaccaccgccagttccctgttcgagctggacctcgacaccggcgagcgcaggctgctcaaacagcaggaagtgaaagacttcgattcagccaactaccgcagcgagcgcgtttgggtcacggcacgcgacggcgtcaaggtgccggtctctctggtatatcgtcatgacacgttcaaagccgggcacaatccgctgatgatctacgcctacggatcctacggcagcagcatggatccaggtttcagcggcagccgtttgagcctgctggatcgcggtttcgtgtttgcgctggcacatattcgcggcggtgccgatctcggtcaacagtggtacgaagacgggaaactgttcaacaagctgaataccttccacgactttatcgacgtgactaaagccttggtcgaacaaaaatacggcgataaagatcgggtgtatgcgatgggcggcagcgccggcggcctgctgatgggcgcgattatcaatcaggcccctgagctttatcacggcatcgtggcgcaggttccgtttgttgacgtggtaaccaccatgctcgatgaatctatcccactgactaccggtgagtacgacgagtggggcaacccgaatgacaaggcgtactacgactacatcctgcaatacagcccatacgatcaggttatggcgcaggattatccgcacatgctggtcactaccgggctgcacgattcacaggtgcaatactgggaaccggcaaagtgggttgccaagctgcgtgacctgaaaacggataacaatcagctgctgatgtacaccgacatggattctggtcacggcggcaagtcagggcgcttcaaggcttacgaagatatcgcgatggaatatgcgtttgtcatcgcgcttagccagcagtaattaaggattcttcaggaaaaaatcagcaataaaaaaggcgactcaatggtcgcctttttactgtctggagtctgagcctacttatccaaaaagtagttcagactgtatttcatatccgcactgaggctgctgacttcgcgcagcatccagcgcagataaccagggtcctgtgaggctatctcagaaatcttctggccgcgatatttgccgaatttaagcgtgcgcagcagcgtagggcgctcggctatcgccagcatctcttcagtactcagaccggattcttcctgaatgcggatcagaagcgaagcggtgacgtagcagtcgtacagcgctcggtgtgggtgtaaatgcgctggcggatgcgtgtcgagatttaagctatgacgcagattttgcaggctgtagctcggctgcccgggaaacacctcgcgcgccagtttcacggtgcagatccattgcccgttcatttcgggcagcatcgcacggtcaaaggctgcgttatgcgcaacgtagtagggatgaccctgatagcggcgcacggctaccgcgatacgcggcttgccttcgaccatctcctcggtgatttgatgaactgccatcgcctgagggctaatttcacggtctggacacaccaggtcgctcatgggttgcgtgataacgccctcaaccacgtcgaccgaggcgatttcgaccaccccgccgttaaacccacaggtttctgtatcaatcactctaaaactcattgcttgctcctgataatttaggctccctgatagcttatcagctcgacgtgtccgtgccatccctcgtgggttttgcgggcaatcgccagtgcgtcctgattggcaggtgcgacaacaatttcatggccgagttcggaccagatggcgctcttgcctgccgggatccacccaccggttggcgcgcagtggtttgccagcatcaccgtcatacggtgtttctcggcataaccgcgcatcatctcgctttctttgtcgtagcttggtttagagattaagacacccgcgccgtagatgtctgccccgccagcggctgcaagctgcggatgcgaaggtgaggcgatgtcagcgcagatagccagacccaatgttctctcgcctagactgagctgagggccgccctgaccgggggtgaagaagtgctcttcagtatcgtgtaaatgttgtttggtgtaggaatacagtgtgccgtctggggaaaaaacgatggcgccaatatacagggcatcgccgtcgttacagcacagtggcgcaccgcacacaatagtgatgttatgattttttgcctgatttcgcagcagttcgagacgcgagtcctgaagcgtcagtcctagcttgcgcgccaactcgggctcatagccggtgagagaaagttcaggaaaaataatcaggctcacgccgtgctctgcggcaagcgcaacggcccgcgaatggcgctgaatatttacatcaatattccccgcgacacaggtaatctgcgcggcagcgattgaaaaatcactcatgaggtcttcccggatgtttatttgtaaggccaattaacaaaaaaacccgcgctaagcgggttttatgatgcgaattccgtattaagcagatgccttcttggcacgtttttctgcttttttctctgcgggggtttttaacggttttttcttcgcattctttttgctatccattcctttactcatattggcctctctcaagcgggtggatacggtcactatgctatttactgcctatttgcgataacttgcaatagagcagcccgactttttcgaaaatatcctgttatggctattttttttcttttataggaagccatgttgctgattatctgtgcagtaaggcgttttactgtgctgccgctcgaaaaaaacatccttttttgaaacccagagtggtaagagattgaccctatactctggatacgctgttattaacacgagcaagcaaatcaatacactggactgaaaaaataacaggaaatttcatgcctaaattgaaagggttgtatttacctcgggaagcatacgccagtggattgctggataccggcgacggtcatcagatttattgggagcgcagcgggaaccccaaaggcaagcctgcggtattcctgcacggaggcccgggaggcgggtgttctgcggtacatcgtcaactttttgaccctaacgattatgacgtcatgctgttcgatcagcgtggctgcgggcgctcattgcctcacgccagcctggaaaacaacaccacctggcacctggtgcaggatattgaacgcctgcgtgagatggcaggcgtcgatcaatggctggtttttggcgggtcatggggttctacactggcactggcctatgcgcagacccatccagaccgcgtcagtgaactggttatgcgcggcatcttcaccatcagaaagcaggagctacagtggtattatcaggacggcgcttcgcgtttcttcccggaaaaatggcagaacgtactgtctattctgtctgaagaggaacgcaaagacgttatcgcggcttaccgtgcacgtttaacccacagtgaccgcgccattcaacttcaggcggctaaaatctggagcctgtgggaaggtgagactgtgaccctgctgcccaccgaggactctgcctcattcggtgaagatgatttcgcgctggccttcgcccgtatcgaaaatcactacttcacacacctgggctttatggagacggatgaccagttgctgcgcgacgtcgacaagattcgccacattccggcggtgattgttcacgggcgctatgacatggcctgtcaggtgcaaaatgcctgggatcttggcaaggcttggcctgaagctgagctgcatattattgaaggagcagggcactcgtttaacgaacccggcattctcgatcggcttattcgcgctaaccagaaatttgcccgcagctgaaagacgttagctcactctctcctgacgggcggccggattatttttgcttcggttcatacggcaggcgagagtatttgtgtgactccacgcggtaaaaggcgacccgctcgcggaaatattcgcgaagatgggcgggttgctcacgctcggcaatctcggcaaccaccggcatgttgtagcgttccttgaaggcgacggcggatgcggccaaatctacgttaattttgtccatctcttctttggctatctcggccagattacggttcatcattttgttcctgattagcgattcttggcgcattgtacaagacagtccggccgaggtgaatgccctgacgcgtgtcacttcaatctaaatgagactactaatcatttttattcatttaattgaatgtctattaattgcctgcgcttaaattaaataaagtagaatattaataagaatgattctttttaatggattttttatcgtgaataattatcactaacaacttcgttcttatttagatgttattttaaattcattaaaatcatgtggttatatttattctttgatttttattctattgtgggaaacaacgctttttattttatatagagttaggcataatgcacacaaataacgcattctaatatccatataaatttaaatattaaatctggagcctcatcgtgcttaaagaagatatgatcaaacagcttaatcaacagctgaatcttgaattctattccgctaacttatatttgcagatgagtgcctggtgcagtgataaaggttttgaaggtgctgcggccttcctgatggaacactctcgcgaagagatggaccacatgcatcgcctgttcaaatatgtgagcgacaccggtgcactgccgctgctcggctctatcgacgccccgcgtgccgatttcgaatcactggccgacgttttcaatcttgcctatcagcacgagcagttgatcactgaagagatcaacaagttggctgacctggcgatgaccactaaagattactcaaccttcaacttcctgcagtggtatgtggcagaacagcatgaagaagagactctgttcaaatctgtcctggataaactcggtctggtgagcaataccggtaacggtctgttcttcgtggataaagatctgaaaaacatggttggccaatcgccgtcagcctgatttttccgctaagtgttgaaacgcagaatacgttaaccgtgttctgcgttttttttattttactcttattattcatgtgattattgacatccccgctgagcttttcgtgcgaaatttgcacatttcttattttctgcattgattacccgttaatttccacagatcccaacggcagattgcgctaaagttgcggctgaattttcatcttcaattagccaaggaataattgtgtctattaaaaaactgatgcgtctgcgtattctcagttctgcctgcgttctagccgcaggtttgatttcacaacaggcttttgcccacgctcatctcaagagtgagacgccggctgccgatagccaagtcagcgtagcaccgaccgagctcactctcggatttagcgagggcgtggaacccagcttcagtaaagtcgtgctggaaggtccgaacaatcagccggtaaaaaccggtgatttcaaactggccaccaacgacaacactcaggtcctgattgccctacctgcgccattgacccgcggtaaatataacgtctcatggcacgttgtttccgttgatggacataagacccaaggtacctacagctttacggtaaagtaacgttatgagcctggcatcgctgtttgtcctgtgccgctttgtgcactttatttccgtgatgcaactttttggcgcctgcgtcttcactcgtttgctgtctccgcaaggtttgtccgcactcctggcgcgtaaaaaccagaccctgatcctgacctcggcctgcctttctgcgttaaccgcgctgttgatggtcgccgtgcaggcagggttatgggcaacggatggaccgacatgctcaatgtgaatgtttggctgctggtgctgaccaccacctttggagaggtttggcgctggcatatactgatggcgctggtcgcgctgctgctgattcttatcgatggcctgcccggacgttttctgatggcgatgctgctaagcgccggaatgctgatagggcaggcgctcatcggtcatgcggccatgcatgaaggcaccttgggcgtattgcagcgcactaaccacgccgtgcatttgctcagtgccgcatactggtttggcagcctgatcccgttgctgacctgcatgaggctgacccatcagcccgcgactcgacctgaggcgattgtggctctgctgcgattctcaacgctcgggcacgcggctgttgcgcttgtcgtactgaccggtatcgccaatagcgcattcatcttgcagcgttggccaacggacattcactcgccttatgagctgctgcttgtttgtaaggccgcgctggtgaccgtgatggtcgcggtggccatttataaccgctattggctggttccgcagttcgcgcaccacaatgagcatacgcagcgacgcatgatcgccgtttgctggctggagtttgctttggcactgttggtgattgctttggtgagcctttttgctaccctatcgcctaattagttgtgctgagcattggattggcaacaagattgttattgagaagtttaacgaggaagagtcatgaaaaaaacgctacttgggggctgttgctcaccctgtctgccagctgtttcgcagcgccgcaagttgttaccgtgagccgtctggaatatggcaaggcatgggcgttcacccgtgaagaagtgatgctgcaatgccgaccgggcaaagccctgttcgtgattaatgacagcacgctggcgcagtatccgctgaatgatgtagcagagcagtgggtgaaagaagggaaggtgagtgcacagccgctgagcattattcagctggatgaccccaaaaatcccggccacaagatgagtcttgccccgtttatcgagcgcgctggaaccctgtgttaagttgagcttcctgaggctgatccacgtcggcctctttaatatccccctgtctaaaaaccccttcttgcttgaattccacacagttaatgggtggttttgcgaatgttgtcacaaaacgtaactcatttcgttaagtaattatcacaggtcgccaaactcgctggaaaagcatttaagctcgactactctttaagttgtatggcttaaccgcctgcatcaatgccaacttttagcgcacggctctctcccaagagccatttccctagaccgaatataggaatcgtattcggtcttttttttgcccactattcaaaccaaaaacttacagtaaaatcaactacttaaccccatctaattaccctgaattgctcccagaaagaacctctgtagccattttaccgccacttttggcaggcatttttgcacccaaaatcgataacggattattggttaaggcatcttctaaatggtcaggggcaaagtgggcatagcgcatcgttacgcggatatccgagtggccgagaatgcgttgcagcacgacaatattgccgccggacatcataaagtggcggttttttatacctaagctcaacgcattcccaatcctcttcatctggcagagactttggaatgcgtgaccaaagttgctcagcttcccctgcttgctcactctgcggtgccgtttggcaaagaataaacgtccaatcctgaggcgtaacgccaccctttgctgatgacacctaaggaccataaagattgggtaaatttcgagaccgctcttaagtcgtgggcattcaccatcggcgagttaaccaccggttggctgccgctgtgtcagggatatatcggttcaaatcgtgaggaaaaaaatcacaggcaaagtcacgcttgacggccctgtcgaaatcaataaaacactgatagtcgagggtacagttacgcaacctgaagaagttaaggcaaaaattttagcgttatttcagaggccagaagttaaatttattctggcccataatgcgaaaaagggatgtttttcatgtcgaataactcgtgattagatttctgatgattgtctattccataacccgcccggcctgttagaaaaagggtgatctaactcttttcacttttccaaattattgcttgggcagcgatcgcggtctttttgtcagagtcgtaggtaattgccggatttccgtaaagctcatacccaagctcaagtgcggcagaaacacgatgacagaaagatgcgtcatccgggccagtcaaaagcctgtatcttggtaagccttcgggtggattatttggcatgtatagcttccttaaaattgatgtgctcaattgccgctaagatataagacgagttgaaagtaacgtcgcgataggttattggcataatgcctcccgtctttttaaacagattatgaaactcttctaactcggtttgacgcaatgggcgttgattgcctttggagttcaggataaacagtcggctattttcactgtaaatactgaaagatttcttgcgggcagccgtgaatagttcgaccggtgtgacaaagtaagcggtcatcatgcttaaaaatctctctgaagacagagcgctaatcgactctatggttacctccgaaaataaaaccgttttgatataatctgcacgctatctaaatcttttaacattctatttaaagctatcagaaattctcatttctaaccatcgaaagagccgctttgacgtatgtctcatctggtttaaatctcgacatatacgcaggcagatcactaggatttttttccgttgatcgttgctataaacgcgtgaccttgacccaaaatcctgctccattcagaaacagaattccggcatgatattgactcccctgaacggagggggcagatgaaaaagtcacgattcaccgaagagcagattgtctttgctctcaagcatgccgagctgggtatctccgatgccacgttttacacctggcgcaagaaatacggcggaatttctccttctgaactcaaacatatgcggcagctggaagaggaaaatctgcggctgaagaggctggttgctgaccttagcctcgacaaggcgatgctgcaggacatgctggcaaaaaagaactgccgatggcagcgcactgcgcctgcgtatccgtgggatcactgaaatgcgaattctgctctgaatttacaggaaaaatgctggacaggtggacgtatgaaagaggggtaaggatcgacttatcacgcccaggaacgccgacggacaatgcgacggtggagtccttcaacggcaggttaaggcagaaatgcctgaacgagagtgggtttatgtctctggaggatgccctccgaatttgccggttgccagaatatgcagccagaatgaagccggttattcctgaatatggctggatcacatacggggagcgggtcaacaagtttcacatctcatcttagtcattaacgacatcttacgtagcgtgaaatattgctctctataatagccttaaagcctgtcctatcaccccatccttgcgctacatcaacatcccagataatgaaattaactaaattactccccgctgtttatgcgtcgtgagtctggggccaaattcttttaatcccgctcccatcagccctaagaaaaatagcgacaaattttaatgctgttgaaaatatctgggtaaaaacaatgtttacgttgttctatttgtccgttgttatggtatttgaaatcactctaagtacggtttgccgacgaggatatctaaaatatttaaaaatcttccatcgttaccatttccgttctctccgcaaacctcgtcagctactctttatcccgcacggtcatcgttgggaaattctaaaacttcagcatttaggcgcgatgagcccatcaggcagagcttatccttctacctacgtgattgcccgctgtcagggatgcggggtccgtaagcacaaagtcttctacaacagccatctcaaggtctctcagtgcaggcgttggttataggagcaaggcgcaatgtctctattcttattaccttaacattcgtgccttaaatatctgagagctctgagtgtcgcgttcagtttgacgaataaatctgtcatctgatggtcttattttttatctatcttttataaaaacatcctctctttcttacggagaagcttatgcagccgtaccaggaatcgctatttcccgtctcgattaagggattgtgcagattagcgacaagattctgctattaaaaaacgagcgggaagagtgggagttgccgggggaaagctcgagaaaggagaaacgcctgaagaatgtcttatccgtgaaatgtatgaggagacgcagatagcgtcgtcggtgcagggcattatcgacgcctggctttaccggattggtgctaaagaaatattgattgtgacctatctcatgaaggttgaaccggcctcaagccaaacgataaaagtcagccatgagcataaagaaatagggatgtttagtctgaatgagattgcagagctcaatatgccaatgggtacaagacgtcgatagggcgagcagtagggcgagtcattaacccagtttgagagcctataggcaaaggatgcagcgacatacgcataatctgaccatcacaaggcacataaggtatcgcgccctgtgatgaagattttttaaatcaggtcgtccggggtacgaaatactactgtttcgagggcgtttcgataaatatctgatttgaccacgtctgtttctatttctaatcgttcgagcagttttgccatgattgctttgttattgaccagtcgtcctttgagggaaagttctatctttatttcctgaatgacgtctgattcgcttttaatggcatgagcagtcttgacgcgggatttttctaactcaacgctgtttatttgagacattttataaccccatgagtagtcaaaaaaataccactgaaggtggaaatcgagtggcaccttcagtggcaatgcaaagcatcttcgttacgagctctaattgagcttcattaaacttatacaaaactcttactttgtacaacttacatttgatcaatttgtgctatttaagtattcttaaatacgtactaataaaacgctaaggcaattaattaattaaagataacttaaattttttaatgggttagtcatgctgtgacttcactctttcatgccaggaaagggcgtgtctggcacagaattgctagcaaaatcggtacaggattttgaccaggttgtacaactttccgagatcgctaagcgaccataattccgagagattttctgaatttcctaatcaagaccacaaataaaagttgtccaatgttctacgctttataggtgagtgagttttaagctcatggtgaaaaaaacaacgactgttatcttcgtctacccctctcatcctaaaaggaactgaaaatgagtgaagccatgtttgagcaagcgcctttgccgctgttaactcagtttacgctgggtgacaaagtgactctggtgaccttccccgtaggaaatccgccggtgagttatcgactcgagacgaggattacggaggttgaagacggtaattatgaaggagagataacgaaagtgacgccgatgggccgtgaggcgtttgatcaacatcatttccacgtcggtgggcatgttgagttcgagaccagcaacatcttgggaaacgcaccataagaacattttaattcttcaacttccgttacattacaggccttctctattctctgcactagcgctaccttagcagcgcgagtgcagatgaaatcagatatcgccgattcaagcatcatgagtactctgccacggtttagctctctgaaatttgattgctttaaggcgatgaacaattcctttgttatctcgcggagaccttaacgtgcgaaagttactcatgatttgtgctgcactggtgttggctgggtgttctagtggcccttatgcccaacgcaacaggttttgcaggcctataccaccagtaaacccgacaccaccaaagttcgtgtacaccgacagccccaacttgcgggatcgattcttgacgagagctgtccgctgattgtttatgttgatgacaaagaagcggccggactacagaaaaatcagtatgttgacctgtatctggcgaacggtgtgcacagcctgaaagtgaaattttcctgtgcaataaccctatagataaagcattgaccatccaggtggacggtacgccgcaaagttatgaaacggctttaaatgatgcgcaacgctatagcctgacaagagtgaagtaaagttatgtccctcattattgaagataaagtgcaagaagaacgcctgattctggttgatgaacaggataacaaggtcggcgtaggcaccaagatgcaggttcatctgcagggcgcactgcatcgcgctttttcggtatttatttttgatagtcagggacgtctcatgcttcaacaacgcgccagtggaaagtaccattctggcggtctttggaccaactcttgctgcggccacccacgtcccggtgagagtaacctggctgcctctacccgcaggctgtatgaggagatgggattccactgtgaattgcaggaagtagaccagatcctctaccgcgtcgatgtctcgaatggtttggtagaaaatgaatttaaccatacttttatcggcctgttcgaaagaacgcccgagcttaatccggaagaggcggaaggttggcagtggatctcggtgcccgacgtctttactgccgtcgagcaggactcttcaaggtttactgcgtggttcaaggttatccttgcccatttcgggcaagagactattcagcagtgggcctctcgctatcgctgagtgagatcagtgttttgccgtgttctgccgcatcggtcctgattattttatgaagtttcccatctcgaaaatgcagggctacgccgtcatcggcggcgtaggcgggcaaaatgttctgctctgccagcaacgcactgaaagattcctcgcgtccttcctcagatccgaaatgcgggcacatgacgcccgtcagcagccccaagcctgggatgagtgaatagccaccgcccgaatccgaatgccctaaatcaaaccagcagatagctccggcgctcacgccgcagaggatagtgccgtggcgcatggccgatttgagctgttgatcgattgaaaattctttccagactgccagcatggcccgcgtattaccgcccgcgacaaaaatcacgtcagctcgcgctatcatctcgtcgatctgtttaaccgtaggataaggcgtgcggaagaaagacaggctctctaccaggtagccggccgacgcgaattttttctcgaattgctcaatcctctctggaacgtctccgctcgccgtggagatatacagaatctgcggactttctttttggcttaaggacaggatatagcgatcgatggccgtaatctgctgcatatcggccgcagtctcaccgcctatagctacaatgtggacctgattcggtacggtattttcagcgttgacggtcatctttacctcgtctcaaataaatcgcatatccttcactataatagaaaattcgtaatgtcatggtcgccagaggagcaaagggtatgcgttatatcctcttcgcgttggttttactgggtgtgagtgtcgccttttttccgtggttagagagccaactgcccgcgcaatacaatccttttacgccattgtcagtgaccgatgctcccggcctgatgactcagtataaactcaggaaaataagtaaaaatcaggctgcgtgccttgccgtgctcgagagtgccagggccgcaggcctgattaatttccaatctgtacctgatagcggtggccagtgtcctttgaccggcgcagtgcgagtacaaaatttcggttcggtggcgctgagctcgagctttttggcgagctgtccgttggcagtcagcggcacgatgtttgtggcacaggcggccgcaccccttgccgagcaggtctttggccaaaggctggtcagaatcgaccacctcggcagctttgcctgtcgcaatgtttatcaccgtgcggtgggcaggctgagtgagcatgcgactgccgaggccctggacgtcgcgggtttcaggatgaaggacggtgaagatgtgaccgtagcaagcggatggaaacgagagggaaaggacgccgactatctgcatcaggtctttcgcggagcctgtccgttttttggcaatattattgggccggattataacgcagcgcacgccaatcattttcatcttggcatgcgctggtttggattctgccgctaacagaagacgctgacagagtctttcaattaatcggccaggtagcgttcgaccagacgggtccagtaggcgacgccaaagggcagactttcgtcgttaaaattataggccgggttatgcagtacggcactgtcaccgttgcccatacgcaggaagcagcccggtttttgctgtaggaagtaggcaaagtcctcgctgccggagataggcggcaggtcgggtaccacgttctcttcaccgagcagctcttgggcgacctgagtggcaaattcggtctctttttgatggttgaccaacaccggataaccgggcacatagtcaatctctgcgcgagcgccgtaaccttccgcatggctagcgatcagcgctttgatacggtcttccagaattttacgcacgccggtatcaaatgaacgcacgctcatctcgagacgcgcgctatcagggataacgttggcggcaaagcccgaatgcagcgaaccgatggtgataacggcggtttcattagggtcgatgttgcgtgaaatgatgctctgaagtgcgacaaccaggctgctggcgaccaaaattgggtcaacggtcatgtgaggacgcgccgcgtgaccgcctttaccgtgaatggtcacgttaacggtatcgcaagctgccataaacgcgcccgtgcggaacatcattttacccacgggataacccgggtggttgtgcaggccgaagactgcgtcgcaagggaatctgtcgaacagtccctcagccagcatgcgttcagcaccgctattgaagccaatttcttccgcaggctggaagaaaaggtgcacggtgccggagaagttgcggctgcgtgccagctgtgcggccgcaccgagcagcatcgtggtgtggccatcgtggccgcaggcgtgcattttgccgctcacgttgctggcgtacgcaagaccggtctgttcgaggataggcagggcgtccatatcggcacgaataccgatgctgcgcgtgccgttaccgaccttaagggagcccacaacgccgtagccgccaacgccggtcgtaacctcaaaccccagctcatggagttttttggcaaccagttcggcagtcttggcttcttcgttggataattctgggttttgatgcaggtgttggcgaatctcacgcaggccaggctcgaggtcggctacgtcagcaatggtgcaaagatttttaatagtcatagcggttaatctgtctctttataagaggataactgttgagaggttgcgttgtgcatcacacaggatgcagtttctgaatgcgcttggcaatgcctcacagagtgtcaaacgaaggacggactatcgctctgtatctgctataaatttaagatgagaatttcgtaaaacggcgttatgggcgaagcctgtggcgcagttcagcgtcaggttgccgagttttaaacaaatttttgcgctagaaagggcaaaatgtcgtttttttacacgctgatgtcgttataaagtgtattcattcgttaccagctaataaaatagctgctttttcttgcgcaagctgacaccctataagaaacagcggacaacattacattgaatctgattatcatcgaattttcgctgccagcggtaccttatcaatctctgtgggttccagcttcaaacttttcatcatttttcagtcataagggaatcggatgatttattccgaaacactaaaacatgtcatgaatttcagtgcattagcgctggttctcggagcagcattttctacgccagcccatgccgatgaggcttggcttcgcgcgtgtgccattgccaaaaccgcggatggctgccagcagcctttccagcagggctggcaccggtaatgatgggctcggcccgtgagtcgcaaggcctgtggggatacatcgatgtttcaggtaagatggccatcgagcctgcatatcgtgaagcccgtggctttgtcaacggactggccgctgtcaagaaagatgacttgtttggctatatagatgcaaaaggcaatctggcaatcccggcacgcttcacccgcgctaccgatttcaacgccaaaggcactgcgttggtggtcatcgacgatcgtctggcgttgatagaccgccaggggcagtcatcaagaccttaccgttcgccgcctctctcaactctgaaggttttaaacaagggcagccgctggccagcgtccagatgcagatctctcctgcgctgtggaatgcatcatcaggccgttccgtgtcgctaccggatgatgttatgaaccttgacgagccgcagtctggccttattcctgctcagcagcgcgatacggcgcaaagtggatattggggttacctcgatgacagcggcgaatgggcgattgaccccatgaagctgaagacccgcaacgaaccgctgcttaacggtaacgtggttgcggtgaagggcaagtcaagctggaccttcttcgaccgcaacggcgtcagtctgagcaaagaacagtacaaatccgtaaaaccactgagttcaggcagttggctggtggtggatgcaaacaatgttcagcaattactcagtaataaattagagaaaactcaggatattccagccgatcaggccgaggaattccacacctggggccactggctgattggtcagggcagtaagggcatcgtgatggtgggccctgacgatcgcattgtcgatgttaaagccaacaagcctcagttactcacccagaacgggcatctttgggtattgcaggctgaccgtggcacagaggataaatctgcccagctggtgcaggtttatgacagcaacggcgtcggtctgctgacgcaggcaacgctgactgcgctaaacgattacaaggttcagccgctggatgctcgcggacttgacgacaacgccgtgtctcagcctgcggggctgccgatggcgctgctgacgccggtcgacaaaaagaaagtgcctgcgattctcacctcgcaagggcttatctttaacagcccgcagtgggcgtcgctggatgcgccgggccatatggggccgctggtggtgaaaaccgaaaacggcacgactggcgcggtcaatgccgacggtcagtgggtaatccagccaaaattcaagcagatatcgccgtttgacgggccttatgcatgggcgatggtcgtcgatgacaagaacgttgaaagccgcaaggttattgactcactgggcaaccttattgatatcccaactcgcgtgatacagaccgcgcagtcaatttccggcggtgacctgctttacaccgagggcgacaataatgaccgccgttggggtatctgggacatcgccagcaacagcgctaaaattccaacccgcttcacacagcttgaggcattccacgacggttacgcactggcaaaagtggccgcaggatggggagttatcgataccaaaggtcagtgggccattgctccagacgctaaccgaaccggcaagccgcagccggtaggcgacagtattttcgtgattgccgacggcgaccagccgggcgaacacggtgacggcagcacgcgctatagcctctacagcgccatcagcggcctggcattagcaagcgatttgctgagcaacccgcagaaggtggggataatcactggttaatccagccggcaaacggcggcgttggcctgatggatgacgacggccgttcggtggtcagtaaagacgttgtgccgcagtctattcacattgacggtgactggacgctgctgagctttgggccgcactatggtgctgtcgatgaccagggcaattggcagattgcgccagcctattcggctccgctgaactttattacgccacaaaactgggccagcgcgctgagcgacaaacgcattaccctgatcgatcaaaacggcattgagcctctggctgataaagacaatgcacagccgcttgcctcgatggatcgcattgtcatgaatgacgacagcaccggcgaaaccgtactctttgatacgcagggcaatgaagttcaacgttatcctggcttgaacagcatcctgcctgccgcctcgagcgagggcatggtgccgctgcggggcgctaacggtctgtatggattcatcgatgccagcggcaaacagctgattggcagctactttacccaggtcggtgcgatgaaagacacccgtgccaaagcggtgaagcaggatacctacggtccgcttattggttacatcaatggcaccggtagcttcacgattctaccgaaatacaattgggcgaccgactttagcgagaaacgcgcctgggtggccgccaaggggctggtgcaggttatcaacaccgacggcgctgtgcaggcgcagtttgcgctgcgctgtaatcagcgcgttattctggatgccaaaaacaaacaaacctggcctgcgaaaacggtgagttgtgccaattccgctcaaaacggagaggcacaatgaaactgatgaaccttaagcctctttcgcgcgccgtgcgccaggttatcaccgtcggtgggaccgttggcctgctgggtctgacctttgcggctcaggccgataccgacaccgcctgtttcgggccgtctaacctgaccgacgccacgctgcgtgccgaaacggcgcagcctgccactctgaatatttgtatccgcccggtgcacgatggccgtgctgccgtgttgcttcccgatgctcagcaggctatcgatgacgtcgcgctggagaaaggcctggacggccaccgctggggcttcctcgataatcggggtcaattggtgattaaacctgtttttgagcaggtcggtgactattactacggtctcgccgcggcgcagcaaaaaggcaaatggggatacatcgataataccggcaactgggttattcagccgatctttgataaggccgggaatttcactcaggttgaccttgcagtggtcaacaatgctggcaaaaacgaaatcatcaaccgtaagggacaaaccgttggcaagccactcgatgcgttggtcgatgacgtacagttgtccgacggtaatccggcccgactggcgctgaactacaaaaccgtgctgctgtcgcctgacgacaggcgccacgtggccaatgacaagatggaagtggtgctgcctttcgggcagagcggactgtttatcgctcgcgacgccgatcagggctatggcatcgccagtcagaatctggactggcgtatcaacccacagttcagcaacattacgctaaatgacagcaatacggcgttggcgatagccaaaacccaagacggtgtgcggctgattcgcgccgacggcgtgttgaatgacaagacttatcagtccgttagcccgctgaatgacaagttctggctggctaaaacggccgacaaaaatagcctgcttgataacgacggcaatgaaatcgcctcgctgagcaatgaggccgtcgccggtctgaccgtgcagggcgagttcctgctggataacagcggtaaagagaacctgacggtatttgtgcccggcaagaaacagatcattactttgccgaagggcagtgtgccgttcgaccagcctagcggcagcttcctgctgaccacgcggggcgatcagcacaaggtgaatgccatcatctcacccgatgggagtctgattggcggtgcgcagccggtgaactggctggcgcaggtcaacaatgccgaggtgatcaacggtcgtctctggttgcacgacgagcagggtgcgctgatcaatatcatcgataacgccggtaaaacgctgctgaatgccaaaaatgttgccgcgttgaacgattatcgcattcagccgcttaacgaccagcagactgataaatcttccccgttggcgttgatcaggcccgacccggatgcttcgaaagcaggtgccggattcattcgtgcagacggcggtgtgcagattgaaggcaagtggcaggatattgagccagccgacagcagtgagtcggcgcgcagcggtctggcccagcagtttatcgttaaaactgcgcagggaaccggtgtggttgacgcccagggcaaaacgcttattcctctcacggaggataatatcgcgccgtttatcaatggctatgctctggattatcaagacggcaagctgacgactatcgacactcacggtaagcatttcgcgctgccgaacgagttcgagttgcagtcggtgggcaacggctggttccgtttccgcgagacggccgctgagggcgcgctgtggggcatctatgacgtggttaaccagaaggtcatcgttgggccgaactatcaatcggtaggcaccttcgagaacggtctggctgacgtacagttgccaaacggccaatggggtattatcgatgccggcggcaaactgctggtggcaccggactatgccagcgtgcgtcgcatcaacaatgcgctgtggcagctcactctgccgcgcaaaaccccagaccaaccggcgtcggagctacagtcagaaattattgccaacgacggcaaggttcgcattggcctgacgaccgacctcaacgtcaatcagttcaacgacggccgcattctggcgacctcggcggaaggacagtcgtggctgcttgacgcgcagggcaacatcgagctgcacgagcagcagaccaagattacggcggtgggcgactgggtcaaactctctcgtcaaccgcagattggctatctcaacgcgcagggcatctggcagattcagccacaaatcctgccgagttcagcgtttgtcaatgcccgtgcgctgcgcattcagccgcagggcaccgagcttatcgatgaaaaaggcgtgcgtgtcgccgcgatgcctgacggcaactggcagcttccggccggcagcgatatgtcggtttcttacgatacagaagatggcaaaccgaccacgcgctacgtcgataccaccggcaagctggtgattaccacccctggcatcggcagtggcatgcagggtggtcaggcggtattgagcgaggccgacggcaataaaacctggattgacgcacaggggcacccgtccgcagcgataaactttagcggtctggggctgatttccgaagggctggcttttgcgcaggttggggaaaactatggatatatcaatgcgcagggcagctttgtcattccgccggtgtttaatgccgtctcggcctttaacagcggtgtggcgattgtctccacggctaaaatgtcgatgatgcttgacgcgaccggcaaaccgttggctcgcgtggaccacgagtgcggtatacaggtgctttacggcagcggcaatacccgcctgtggccgcaaacgatgccggtgaagtgtccgtaatcgacggcatccccgacgataaattttcatgctaatgtttacagagttaaccccgtagaccggtaaaataaaaaggataaattatgcttcctcctatcccgcaaaaatataaagacgcggaacgttggtcttttggtgacaacgaggcgcaggctgatgatttggcgcaaaaagttatcgcaggcattaaaaccgcgacctgtgccaatcttgacgatgaaggcgagccggaagtgggtgaagtgtttgtcgtggttgacggccgcaatcatccggtttgtgcggtaaagctgaccgaagtcaaacaggtgccattcgacctggtgacggaagagcacgcttttgccgagggtgagggcgatcgtacgctggcttcatggcgcaaagagcagcagcgtttcttcgaagagtacgacatgttcgcaccggatatgccgctgctgctgatgaaattcacgttggtcgaaacgttctgatgagcgtgccgtatttcagccaatgggaggcgccgtcgctggcgcctgatattctgagcggcaaaaaaagcctgcaggatattgacgcatggccggcgtcgggcgcgcagtcgcaggcggagtttgtcgagtgggcaaatcacgtgtgcggtatgtgttgcctgaagatggcgctggcggccaccaccggcaacgtggtgcccattcttgaattaacccgccgcagcgtgccctatgggacctacgtgcgtgaaggggatcatattcgcgggctgatttacgcgcccttcgttgagtttttaaagcatgagttgcagataaccggtcaggttagggttgaattgaccgccgaggatatcgcggccgagctcgaaaaaaatcacttctttattgcgtcggtgcatccggggatccgtcacccggaaattgcgccgcctcgcaccggtggtcatctggtgttggtgactgccgtcgagcagggcaccattaccttccataatccatcagggcacaacgaggctacgcagtcttacgtgcagcttcctgttagtcaatttgcccaattctttgccgggcgaggcgtggcaatgatgccgcgcactattcaaaacgcataatccactcgtctttctggctgtcatatttctctttgtagagtatcgactgacggccatcgaccacagcaggcacgctaacgttttcatcccagccgtcgagctgcatgcataagtctgggtcagacttgcagggaatgtgcaccttgtcgccgccttgcccgtccggcgaggtgtgctgtgcgtcatctatctcgaaactgcctattcgtacgtttgcttttcccataagaatctccgcatcgaaccaatgtgtgtgaatgtctagaggtatgaccagtttggtcattacttgagaatagctgaatgtgcaaaaagtgccatctgaaaattccagcttgggatcgggaaagccattctggggagggaaaagcgggcaggcctcgaaacgaggcctgccttagaacgatcagtttttagggatggcggttccccactgctgccagtccttaggctcttccggcattaacaggaagtgacgtccggtcgaggcctttggtgccaccggtatggttggcggcgtggcgaaggcgatacctccgcgaatgaactgttggaaggtgccgctcttgaacgtgccgcctgtcaaaccaaattgcaggttataccctgaagccagccagaaggtggtgttgtcacgcaccaggtactgatacttcttgctgatgcgaagggagacattaacgcggtcggccatttcgccaaggcggaagccggtgacggtgccgacttcaatgccgcggaagagcaccggtgtcccaatttgcagcgagccgacttcggtggcatccaccacaatcgctaaaccgtcggtgtagcgcgagtcggtgatggtcgccagctgtaggtcaaaggtccggttaggcggacctttacccgcttcgacgttgatatacggctgaagcagtgtatcgaggttctgaacgccggccgccgaaatctctggcgagacaatcgagaagcgcgtgccgagacgagcaaaggtatccacgtattcaggatacagcaccgccttcgctgccacctgattcagctcgggatccagcttcagcgattcgacctgtccgatggtaattccgaggtagcgaatcggcatgcccggagagattttgctggcgtcataggtattcagcgttatctggctgcccagggcgcgcgcggcggtctcgttatcgtaaagcacgcgtttggtgcctttagttacggtgacgccgtcaaggttgtcgaagctaatcgcgcctttcaaggctcggtccagcggagaagcctgaacggtcaggccgctgccgttgagctgtaccttagcaccgccttcggcccagaaaatcgttttcggtgtcagcaagttacggtattcggggctgatatagacgtcaacctcaaactcattggctttcgggcgcacattcacaatctcaccgacctggaacttgcggtaaagcactacggaaccggcctgaatatccggcaggctcttggcggttaaggtgagcgtcgcgctcggtttctcgcccacaatgccttctgcggccttctcggcgttgctgtaaagtggatattggcctgaaggcgttcccttactgcccggcaagacgcggataccgccgtcaatccactcctgcgcgctggcgcccagcacttccataccgtccacgccgagtttcacgtcaagacgactattgaccacaaatttactgtcctgatgcagcaggttcttatactgcgattttactgcgatgttgaacaggataccggcgtcggtcagtgtgcggtcaagcacctgaccaatcaccattccgtgcagcagcagcggctgacctgcatcaatgccatagctctgtggcgctaacagttgcagtctcatcacgccggggtcttgcagcatgcgttggctgctgtcgagcacggtgaagtgattctgaggctggccttcgccgggaataaggtcgaaggtgttgccggtcagcagttggctaatcttggcgttgttcaggctaactctcgggctattcatctcaatgcgcgtgccgctgcgcatcaggtcgatgacggaagggtcaacggtgagtttgccgatgactttgttgtccggctgaagggaaatctgcgtcagcgtacccacctgcaggccttgataaatcagcggggtgcgcccttcgctcaggccttcaccgctcggtaaatcgagcgtgatctcaacgccgcgatgactctgcgcgaggtcagggtaaagctcatacgactggtcggttcgggcctctttgccgtcggcaggagagtcgagggcgattgcgccgttgaccaacgccgccagactttccatttcgatcttcgcgccactgaggctaaagtcggccttaaagccggaaacgttccagaaacggctgttatccttcaccagatgcgcaaaacgcttgtcgatcagcacgtcgatgctgacaccgttgtttccagactcaatatcgtaatcgtagactttaccgataggaattttgcggtaatagaccaatgagccattgctgagtgaaccgagatcgctggaatgcaggtgaatcatcaactcaccggtgttcaggcgatattttggctgcgtgtccagcgcggtgaagtggctctgcgtcttgccggtacccggcatcatgccgatatagttaccgccaaccagcgcatccagcccggaaataccggccagcgaggctttaggcgtcaccagccagaactgggtgccctcgcgcagagagtccgccagctcactgcgaatgctgactttgaccatgatggtgcgcaggtctttgctcaggctcagtgactgcacggtaccgacctcaacccctgataacgcacgggagtgcggccagcgacgatgcctgccgccgactggaagtcgatggtcaccgtggtgccttgttcctgataattgctgtagagaagccatccggctatcaataaagcaatgaacggcagcagccagaaaggagaaatccggcgtctgtttttgacccgtgcttcagtcggtgtattcggtgtgtcttgttgcatgtgcatcccaaatcaggcggctgtccagccattcaacggcaagaatagtcagtatcacggcagagccaaagtaaaacgcggccggacccatagtaaaagcgagtaactgatcgcgattaaccagtgacatcatcaacgaaataacgaataaatccaacatggaccagcggccaatccaggtcaccagacgcagcaggcggatgcgggttttcagcccctgatgcgccttgaagtgaatacttagcaacagcgtcagcagcacgatcaccttggtaaaaggcaccagtacgctggcgataaacacgatggcggcaattggcacgttgcctgaggtcgctaacgacacgacgccggagaaaatagtgtctttaagctgctggccgttggcgtagattatcgaaattggcagcacgttggccggaataagcagcaccattgctgaaatcagcgctgcccaggttttttgcaggctgtgcttgtagcgtagcggcatcggtacgtggcagcgagggcaacgcccgcgtgcgtccggatggccggtaaatttgcacgccaggcacagtaccagcgattctggcacgcccttcggacggcgctgcgggtaaaactcgtcccacagctgctcaatattgagattaatcagggtcagcgtgaccagcagcgtcatcatgatgtaggcgaccagcgccgggccagtgtcgatatccgcatactccttgaccttaatacaggccacgcccatacctatcaagtagatatccagcatcacccagtctttgagccggtcgagcatcagcagaacgggtttcaggttcatgccaagcttgctgccaaaatgcagatacagaatcgagcaagcgagtgtcaaaggtgcgcccacggtacagaaggccaccatgctggcggtcagcggtgaaccctggctcgacatctgccagataccttcaaataagctggcattgatgcgggtgcccagtaaacgaatgcttatcagaggttcggtgtaggcaaagggcatcaggaccaggatactgatggcgatgactatcagacgaggcagcgaacagactttacctttttcaaccttgctattgcagcgcgggcagtgtgcagtctgggttctgcgcaacgccggcagggtaaaaagataatcgcattcgctacagcgctgatagcgcggatgcggcagcgggcctgacattgttcgtattttcattggacctgcaagctaaaagacctgagtaaaatttggctgattgtcatactgatgcgccgcctgctgcctcaataaatgctaaatacagcagacattttggttatctgacgctcttgggactaagaaggtcaggatttttagataaaataacgtatcatgcaaacgtcagaacaactatttgtctctggcaaaacatatattgtaggccagtctttttgaagtcacattggattaaccttgtcgagatacgcatttaatgcttattttatagaggctaagcgtgcaaaatagcggtctacccgtaggttttaatggttacaacatgactaaagaagcattctacacggaattaaaacgtgacctgaacgcgttaatcgcgggggaaaacaactttattgccacactgtccaacgtcagtgcactgctttacgagcgtcttgagggcgtaaactgggcaggtttttatctgatggatggcacctcgctggttttgggtccgtttcagggcaaaatcgcctgtgtgcgcattccggtaggcaaaggagtgtgtggaacggcagttgccgagaatgcagtgcagcgcgtcggcgacgtgcatgcttttcccggccatattgcctgtgatgctgccagtaatgcagaaatcgtcttgcctttgaccgttgcaggccaggtaataggtgttttggatatcgatagcactatttatcaacgcttcgacgaagtggatgaacaggggctaacagaattggtagccgggctttgtcagcacctggaaaacagtgatgctgcaaaatatgtcaatttgatcgcaagttgatcgacggatcacgtagcatttacgggcagcgtcattataatgtcgcctgttcatgcctgcgccggttggcaaacccgttgtaatcaggaaatttcatggaaaatcaacctaagttgaacagtagtaaagaagtcatcgcctttttggcagagcgtttcccgctttgcttcagcgccgaaggtgaagcgcgcccattaaagatcggtatctttcaggatctggtagagcgcgttcaaggcgaagagaatctgagcaaaacacaattacgctctgctctgcgtctgtatacctcaagttggcgttatttgtatggcgttaaagttggcgctcagcgcgttgaccttgacggcaatgcctgtggtgttcttgaagaacaacacgttgagcacgcccgtaaacaattggaagaagcgaaagcccgcgttcaggcacaacgtgctgaacaacaggccaagcgccgcgaagctaacggtgaaaatgccgagccgcgtcgtccacgtccggcagcaaaaaaacctgctccgcgtcgtgaaaatgcgcctgccgctgtttctggtcaagaaaatcgcaaaccgcgtactccacgtcccgcacgtgaagtaagcaaaccgcgtcaggtgccagtgacagatatcacaaagctgcaaattggccaggaaatcaaagtcagagcagggaagagtgctatggacgccaccgttttggaaattgcaaaagacggcgttcgcgtgcaactctcttcgggtctggcgatgatcgtgcgcgcagaacacttgcagttctgatacggaggccaactcaggcatgaacaaatttgtcagattaagcgtcattgcgggtctgctctttgcgggaacagggctggttaacaccagctttgcgaatgatagtgcaccggtcactctcagtcagcttccgcaactggttcaggaaccgcaggatgccacggtgagtgagcgcgtcactgcgcgattcacccgttctcactatcgtcaattcgatcttaatgcggacttctcagggaaaatctttgatagatacctgaatatgctcgataacagccataatgtattcatggcttccgacatcgcccagttcgccgacaagcgcggaacgctgggagaagagttgaaatccggtcaattggtcacgccttacgcactgtataatctggcgcagaaacgtcgttttgaacgctacgaatatgccttgtccgtgcttgagcggccaatgaactttaccggaaacgactcgattaacctcgatcgtaccaaagcccgtggccgaaagacgccaccgagctggaccaactttgggaccagaaagtcaagtatgacgagctgaacctcaaactgaccggtaagaacgatcaggaaattcgcgatattctcggcaaacgctatcgattcgccatgaaacgtctgacgcaaagcaacagcgaagacgttttccagctaatcatgaacgcgtttgctcacgaaattgatccccacaccaactatctgtcaccgcgcagcaccgatcagtttaataccgaaatgagcctgtctctggaaggtattggtgcggttctgcagggcgatgacgactataccgtgatcaactcgatggtagcaggcggcccggcggccaagagcaaagccattgcagtcggtgatcgtatcgtcggcgttgggcagaccggcaagcctgttgttgacgttatcggttggcgtcttgatgacgttgtcgcgctgattaaaggtccaaaaggcagcaaggtgcgactggaaatcttgccagcaggtaaaggaaccaagacccggactatcacgttgacccgtgaaaaaatccgccttgaggaccgcgccgtgaagatgaccatcaagaaagtcggtaacgaaaaagttgccgtgatggacatcccaggattttacgttggcctgaccgatgacgttaaagttcagctgcagaagatggccaagcagaacgttaacagcctggttatcgacctgcgtaccaacggcggaggcgcgctgactgaagcggtttctctgtctggtctgttcattccgagcggtccggtggtgcaggtacgtgacaacaacggtcgtattcgccaagacagcgataacgacggcgtggtgtactacaatggcccgctggtggtgctggttgaccgctacagtgcgtcggcttccgaaatctttgcagccgctatgcaggattacggtcgtgcgcttatcgtgggtgaacctactttcggtaaaggcaccgttcagcagtatcgctctctgaatcgtatttacgatcagatgttgcgtcctgagtggcctgcgcttggctccgtgcaatacaccatccagaaattctatcgaattaacggcggtagcacgcagcgtaaaggcgtaacacctgacatcgtcatgccaactggcctcatcgacaacgacgtcggcgagcgctttgaagacaacgcgatgccttgggacagcattaatcctgcgacctataccaagaccggcgatatgaagccgttcattccggaattgctgaaagagcacgatgcgcgtatcgcgcaggatccggaattccagtatattcagcaggatattgccaagtacaacgccaacaaggacaaacgtgacgtcgtttctctgaatttcgctcagcgggataaagaagacaaagaagacgatgctatccgtttgactcgtttaaacgaacgcttcaagcgtgaaggcaagaagcccatcaagtctctcgacgatctgccgaaagactacgttgcgccggatccgtatctggatgaagccgaccacattgccgttgacctggctaagcttgaaaaagcgcaggatactaaaggcaagtaagctgtcgtttagccgttgtcagtcgaacggttgtcacaaaatgagtagcgcacttcggtgcgctatttttttgtctgctgtttgccgagcgaggttgtctacaaaacgcttcaaaatgtaaagtattgtgaattgtcggctttggcgggtattgacccttgaatcctgcggggaagcccataggatcaggttatgctgtctgatagagacggtatcaatgtagtaacaacgacaacaacaatgaggaagtattaattttatgatgcgtatagcgttgttcctgttaactaacctggcggtcatggtcgttttcgggctggtgctcagcctgacaggcatccgttccagcagtgcaatgggactgatgatcatggccggtctgtttggcttcggcggcgcgttcgtctctttgctgatgtctaaatggatggcgttacgctcggtaggtggggaagtgattgagcagccgcgtaacgaaaccgaacgctggttgatgaacgtagtcagccgtcaggcgcagcaggccggtatcaagatgccgcaggttgccatttatcacgcgccagacattaacgcctttgcaaccggtgcacgtcgtgatgcgtcgctggtagcagtgagtaccggcttgttacagagcatgagtcaggacgaggccgaggcggtcatcgcccacgaaatcagccatatttctaacggcgatatggttaccatgaccctgattcaggggatcgtgaacacctttgttatctttatctcacgtattctcgcgcagattgctgccggatttatgtcgggcgatcgtgaaaacgaagagagcggtaacggcaacccgttggtttacttcgcggtttctatggtgctcgagctggtgtttggtattcttgccagcatcatcaccatgtggttctcgcgccaccgtgagttttacgccgatgccggttctgcaaaactggttggccgtgagaagatgattgctgcgttgcagcgtttgaaaaccagtcacgagccgcaggaagcaggcagcatgatggcgttttgcatcaacggtaaatccaagacctttagcgagctgtttatgtcgcacccgccgctggataagcgcatcgaagccctgcgcagcggtcaatatctgaagtaagtcttaggatgaaataaaaaaggcccggcaatgattgccgggcctttttgctttctgtcgcgggtcagactttttgctggctgaccgatttttgggtcatgcgcatcacgctaacaattgcaccggccaacgccagcgaaccggccagaacgagcgaagcgtgcgtgccgtgtgcgctaaacaggttgaacatcagcgctaccattgccgcaccggtgctttgccccagaagacgggcggtacctaacataccgctggcaccgccgctgcggctgcgcggcgcagacgagacgatggtgtggttgttcggtgactggaacagaccgaaacctgcaccgcaggctatcatgcgccagatgatgttcaggtgcgaaggtggtcgggtaatagcgccagtgaatatagacccgcagagaacaccaccagtccgataccgccgagaataccggcgtgatagcgttcaaccagacgtccggcaatcggcgccatgaccatggtcgccaacggccaaggcgtcagcagcagaccggtttcgacggcgttaaggcccaacgtattctgtaaaaagaacggcagtgacacgaaggccagcatctgtgccgcgaaggaacacatcgaggtacacagcgacatagtgaaaataggaatacgcagtaaatcgaccggcagcagcggggaggttttgttcagctggcgacggacgaagaaccagccgacgatgaccagcacaatcacttcagcgaggatcagcaggcggttttggccctgcgcaaagccactgatggcgctaatcaacagaccaaaggtcagggcgttcatcaggctgctgatgaaatcaaatttttggcctgaagttttcaccgggttagccggcaggaatttcgccgccaggcagaaggcaaccagcccaatcggcaggttgatggcgaacagccacggccagttcgcgaatgacaataccgccgcggccacggttgggcctgccgccgaagacaccgccacaatcagcgcattgatccccattccacggccgaggaagcgttgcgggtagattatcctcaccaacgcgacgttcacgctcataatggatgccgcaccgaacccctgcaatatcctggcaaaggtgagcgtggcgagcgagtcagacagcgcacaggccaacgaagtgaggctgaaaactacaaggccaatcatatagatacggcgataaccaaagatttcaccgagcgatgacagcgaaagcagcgaaatagtgatcgctaattggtaggcgttgactatccatatagaagaggcggggctggcgtgaagatcctgtgcgatggtcggtaaggccacattggcgatagcgccgtctaaaactgaaacggtgaggcccagcgcgatagtcaggatcgccccatagcgttgtggtgcgggaagtccgtcggaaaccgtggttgtcatgtctgattgtcagcgttgtgctagtaagagaggggaatattatcacgctaactacccagcgtctgaatctgcaagccagtcatcatctttattaattgtaacgagaattaacatttcactcacatgcgcgccttgcgcttggtttaatttcatagaaatagcgttccattttttatgaaacaaaaaaagtatccgacgattgtttatggaataatggggccaataatatacaaaacaaaatccaggcaggtagagagactatggctattgcagatcttgataagcaacccgattcagtatcctcggtactcaaagtatttggcattttgcaggccctgggtgacgaacgcgagatcggtattacggagctttcacagcgcgtgatgatgtcgaagagcacggtatatcgtttcctgcaaacgatgaagtctctcggctatgtcgatcaggaaggggagtcggagaaatacacgctgaccctgaaactgtttgaactgggtgccaaagcgttgcaaaacgttgatcttattcgcagcgccgacatccagatgcgtgagctttctcgtctaacgcgtgaaaccattcacttgggtgcgctggacgaagacggcatcgtttatatccacaagattgattcgatgtataacctgcgcatgcactcacgtatcggtcgtcgtaatcctctgcacagtaccgctatcggcaaggtattgttggcctggggagaacagaacgacgttcaggcaatattggccgagatgcagtttacccgcagtaccgaaaataccctcatggatgcaccaagtctggtgaaggtgcttgagcaggtgcgtgagcagggttatggcgaagataacgaagagcaggaacaagggctgcgatgcatcgctgtaccggtgtttgaccgatttggtgtggtagtggcagggctaagtatctcgttcccgaccattcgtttctcggaagagagcaaacaggactatgtcgcgatgctgcacacggcggcgagaaatatctctgagcagctcggttatcacgattatcctttctaaaaaatttccggcttaggcttaaaagaaaaacgctcccatgatgtggagcgtttttttttgtggtgccaaacgaggctgggaacaataatcacggccagaatataaagagtgcgagcctgcttctgttccagagagtaaagccggcgacgcttgttttaacgccgccttgacaggctttaacggtctcgattaacggtgcgccagttcggcgtgttcttcttcgtccatgacttttttatcggtcagtttcagcaactggctggtaatagtcccggcggtcattgaaccactgacgtttaacgcggtacggcccatatctatcagaggttcgatggagataagcagtgctaccagcgtcaccggtaggcccatcgcaggcagtacgatcagtgctgcgaaggttgcaccgccgcctacgcccgcaacgcccgctgaactgagcgtgacgataccgaccagtgtggcaatccacatcggttcaaacgggttgatacccacggtaggtgcgaccatcaccgccagcatggttggatacaggccagcacagccgttctgaccgatggtggcaccaaaagaggcggcgaagctggcgattgactcaggaatgcccaaacgacgagtttgtgcttctacgctcaacggaatggtggcggcacttgagcgactggtgaaggcgaaagacagcaccggccacactttacggaagaacttcgcgggattaacgccggtaaaggacaacagcagggcgtggacggcgaacataatcgccagacccagataggaggcgaccacgaagctgccgagcttgatgatgtcatgaatgttggagccggcaaccactttggtcatcagcgccatcacgccataaggggtcagtttcatcaccagacgaaccagcttcatcacccaagactgcatgatgtcgatgaaggcaagcaccttaggccctttttcggcatcgtctttcaccagctgaagcgcagcaacaccgacgaaagcggagaaaatcactacgctgatgattgaggttgggcttgcaccggtcaggtcggcaaacgggttttttgggataaatgacagcaccatctgtggcacggtcaaatcggcaaccttgccaatatagttggtctgaatagcggcaagacgtgcggtttcctgcgagccttgtaccagaccttcggcggtcaggccaaacagcttggtcacgaagacgccgaccagtgcggcaatcagcgtagtgaacagcagcgtgccgatggtcaggaaactgattttacccagtgaagaggcattgtgcaggcgggcaaccgcgctgagaatagacacaaataccagcggcataacaatcatttgcagcagctgtacgtagccgttacccacaatattaaaccacggaatagagtttttcagaatagcgctgtcagaaccatagatcagctgtaacgccagaccaaacaccacgccgaccagcaggcctacaaggactttctttgccagactccactgcttgcggctcgattttgccagcaataaaagaaggacaacaaataccactacgtttagtacgagcggaagattcatacctagagctccagagataacttaacgaacaatgctttaagaatgctgcctttagaagggggcaccagcgtattacaatgcgcgtagattaccagataggccggagggatacttatagccaaaaggaataggctattacttttggcttttttttgtatgaattacgcgctatttggcggcttgttcgccgacattaagtcaaatacttcaaaatgaagttaagaccgtgcggattgaccgcatcaatgataggcgtccagttcggccagaacagggtaagtccgaccatcagcaggcagaaggtgcgctcaagctggttgcctttctgactttggatcagcggcagacggaaacgccagcggcagggccacagcagaggcacacccgcaggagttagcatatcggcaataatgtggctgagatagcctatcaccatgccgtgcagcgcatcaattggaataacccagtcatgcggcaggcgggttttcagtaaaaacacccctgcggcgacggccagcaggctatgggtgaatcctcgatgcccaaacatacgggcgataggcgccgaaatccatttcaggcgttgcccaagcagagatttagggtgatcgatatcgggcagcagcgaggtgagcagtgaggcagggataatatgccaccagtcaccgtgagcaagctcaggcgacagctcagcttttttagcaaagactgcgcaagcaattgaaaaaatgagatgaccttccgcagtcataatgcatccgaactgaataactgttattttatccagtatagatgaaagcctttttatgcggaaggtgttacgctgtaactatttgtcaattatttgaataataaatgaaaaatagtgtgtcggtgacagtgtaatgagcgattttatcgctatcttgccagccagccgccgtctaccgccagcgtgtaaccattaacgtagtcagaggcgcccgatgccagaaacaccaccggtcccataatatcctcctgttcaccccatcgcccggcgggaatgcggtcgagaatctcctgactgcgcccctcgtcggcacgcaactgttcggtattgttggtaaccatatagccgggggcaatggcgttgacgttaatattatatttcgcccattcgttggcgagcaggcgggtgatccccattacggcgcttttagacgccgtataagacggcacgcggatcccgccctgatacgacagcatcgacgcaatattgattatctttccgccgcgcccctgcttgataaactgcctcgccactgcctgcgccataaagaacagcgtcttgctgttgacgttcatcacgtcatcccagtccttctcgctgaatttcagcgcatcctcgcggcgaatgataccggcattattgaccagaatatcgatatggccgagttcgctaacggcgctttcaagcagccgaggaatagcttcaatgctggtcagatcggcacgtaagtccaggaagcgccgcccgagggcgtgcacctgatcgagtgtttcattcggctcagagcggtttacgccaatgatgtcgcaaccggcctgcgcaaggcccaccgccattgcctggccaaggccggtattacagccggtgaccagcgccacttttccttcaagatcaaagctgttcagcaccataatcgtttctcgtctctgcttatgcggtggaggtcagttaaacgccttatcggagtgcgctgaccggaacctgatccatgtcgttaaatacctgattttcgccgaccatgccccagataaaggtgtagcgcttagtgccgacaccggcatgaatcgaccagcttggcgagataactgcctgctcgttgtgcaccagcaggtggcgtgtctcctgtggctcacccatcatgtgaaacaccgcagtttcttcatccatatcgaagtagaaatagacttccatacgacgatcgtgagtgtggcaaggcatggtgttccacaggttgccttcctcgagtttggtcaggcccatggtcagttggcaggtttccagcacgtcaggtaccaggaacttattgatagtacgacggttactgctcgccggatcgcccagcgtctgcggtgacgcctcggccagcgtaactttcttgtccgggaagcgggtatgcgccggggcgctgttgtaatagaacttggccgggtgctgtgcatcgacgctgctaaattcgacctgtcttgcgcctttgccgacgtaaagcgcctcttccttgccgatttcataggtttttccgtcgacaacaatcaagcctggtccaccgatattaatgacgcccagttcacgacgttccagaaaatagctgacgcccagttgttttccgacttcatcgcccacggtgacggttttttcgatcggcataacgccgccgacgatgatgcggtcaatgtggctgtaagtcatcgtataggcatttttctcgaaaattttctcgatcagaaactcacggcgcagtcctgcggtatcgagttgtttggcgtgatcgctatgaatactttgacggacttgcatgtcgttgcctcttctacgtaaacaaaataaaacgcggaaagcgcatgacgatttccacactcggttttcgttgctgagagaagcataggatcgttggactaataattcaataaaaatgaaatgctgttttaatttttgtgggtgcacgcaaactttgtgacttttctcggacctcaagcaaaaaaagacgggcgctgtggcccgtcgtttgatgatgcactgtgtttagtgattaaacaggccgaggtcttccgccgtgagctcggccagtgatgctagtttcacgtcggccagcgaccaacggaggtcctgcgccagcaaactgtcgggtacgacgatagagcgcatgcgcgcggccttggtggcaatcatgccgttaaaggaatcttccagcgtcacgcagtctagtgggtcgacgtcgaggtgctctgcggcaagcaggtagacctcggggtgcggcttgctgtaggccaggtattcggcagactggcgggtctggaaataagattgcaggttaaacatctccaccaccttgtctatcatatgcaaaggcgaggcagaggcgatgccgattttcagcccgcgctcctggcacagctcaagcgcgtgctgcacgccgggcagcagagggcggctttgttcgaccagctcgatgcagcgcgcgatgattcgcgcagtaacttctgcctcactcggtcccttccacggcagcgcctgcgcccaaagacgaacggtctgatcaatccgcagccccaacgtgtgggggatcaggtcttttcgagagatatcaacgccgatgctttcaaaaatctcaagttctgactgcatccataacggctctgaatcaatcagtagtccatccatgtcaaaaattgcggcttgaacgggttttacatgactcatttttaccactcccgattacactgaattagcttgatgataaaaagagcatatcacagactgctgaggggctcagcgccgaaataatgagtcattaaaagatgttaaccaaaattttaggcgtctttcgataactatgggtaaactggcgtttctactgagacgtcctaaacaaggggaatacatgacgtatcaacaggcaggccgcgtcgccgtcttaaaacggatcctgggatgggtgatttttatccctgcactactttctactgtgatttcattgcttaacttcttttatgagcagacgaaagccgagaaggggatcaacgcggtcatgatcgattttgtccacgtaatggtggacatggccaaattcaacaccccgttcctaaacgtattctggtacaacgcaccgcagccggtattggggcagggcgtgaccagcgccaacatcatgttcattctgatttactggcttattttcgtgggtctggcgctacaggcgagcggagcgcgaatgtcacgtcaggtcagacacattcgtgagggcgttcaggatcagctaatccttgagcaaactaagggcagcgaagcgagaactcaacagcagattgaagagcggattgttattccccgtcacaccatcttcctgcagttttttccgctctatatcctgcccattattattgcgattgtggcctatttcgttctgaaattattaggactgctgggctaatccgcgtcagaatattgcctgaataacattaggttattagacggttggtgcagtaattaataagcctgatcatatttttatggtcaggcttattttcggaaatatcttatctttattcccgctatttctcgtgcagtaatcttgcaatcgcgcgttcagccaccaccatatgttgccctccaaacaggttgcttcggttcagcaaatagtagagctgataaatcgactggcgttcaatatagccggagggaagtggggtaatactttgatagccatcgattaactgcgaaggaatattggggtaaagcggtagcatcgccaaatcacattcgcggtcaccccaatagcaggccgggtcgaaaataatcggccccgtttcagactgcgcgcagttgtgtggccaaaggtcaccgtgcagcagggaaggctgtggctggtggttttgcagcctggcccgaaccttctcaacgataagctcggcatcgccgaaattcatgcctttctcggcggcgagttgtaactgccagccgatacgttgctgggagaagaaggtcgcccagcgccgttgccaggcgtttggctgcgttacggtggcaagttcgttgtcgaagtccaatccgaattcaagctgttcgctccattgatgaagcgcggccaactgttgccccaggaggtaggcgttatcgacgtcgagcggggaaagcggcagatattcaagcagcagaaaactgtaatcgcggtcgctgccaacgccgtagacttccggaacctgaaccgttttgctcttggcgagcatagccaactgatcggcttcggcggcaaacagctcgagcatttcccggctattgcacttaacaaacacctctttgtcgccgtagcttactcgccaggcggcatggatctcaccgccgggaagctctacgcgttcacgaatttctgcactaccaagatgttcactcaacagacgattaacggcttgccacatggtatcaccccttctgactggccagataattcattaagttagctttttcattgcagtaaaaccccgatcgaacgcacagcacagggcagggtattgattatttatatcaggcagattactacattcattatttctaaaatcacgcaaagcacgtaaaaaaggcattattaccaaaaactgacattaatacaggatttatccgatcgactaattcctcagttccttgtttcatctagcattattaataatagacgaaaaatatattctagtgttcaaaaaatgtgtatatgctggctttcgtccatgtcgcgagagaaaacacgtgaaactcaaatttctttatttgatgactgcgctatttttagcggggtgcgcgaaagaaaccccaatacaaacaagtaaattgacgccgcaataccctgttcaggaagagccctcgttaatgcatcagggaccttacggtagcgttattaaacaggcagccagcacctacggcgtcgacgaaacattagttaaggcaattattcaggtagagtcaggatttaaccctggcgcagtcagcaagtctaacgccgtcgggttaatgcaactcaaggcttcgaccgcaggacgcgacgcttaccgactgaaaggacgctatggtcaaccgaccacccatgaactgaaagatccacgtgttaatattgatttaggtaccgcttacctaagcatgttgcagcagcaattggccggaataagtaatcccgagaccctgcgctatgccactacggttgcttatgtaaacggagctggagcactgctgagaaccttctcgaaagatcgggtttatgccgtggctaaaattaatcaaatgacgcctgagcagttctataaacacatacagaaaaatcaccctgccgctcaggccccacgttatctgtggaaagtgaacaacgcctatctggcgatgcgttaagacgaattcaataaacgcccctgtggaaacacatccgggggcgtttaatctttccgtgctttcatgaaatcttgcacactcctgctatcactgggctcaacgccagtaacgcctgtattccccaaaaaaagccacgtaagttgctggaaaaatgcgctttacgggtgttacactcttttccagttgtttgcgtcacaccctaagttctgccgttgattgagcttatgcgtgtacatatttggcaaggtaaagctaaatagcgcaattaaccaaatgaattcaaatacaaatatttttctatatgtgctctgtcgtgtggggcaccactgtagatgaggaaacaacatgcctgttattactctccctgacggaagtcagcgtcagtttgatcatcccgtttctccttatgatgtggcactggatatcggtccgggtctggcgaaagcctgtatcgccggtcgtgtaaacggtgagctggttgatgccagcgatctcatcgagaacgatgctcaattagccattatcaccgccaaagatgatgccggacttgaaattctccgtcactcctgtgcgcacctgttgggtcatgcgattaagcagctctggcctaacaccaagatggctatcggtcctactatcgacaacggtttctactacgatgttgacctggaccgcacgttgactcaggaagatctcgacctgcttgaaaagcgcatgcacgagctggctgaaaagaattacgacgttattaaaaagaaagtcagctggcaggaagcgcgcgacacctttgagagtcgcggcgagcagtacaaaatgactattcttgatgaaaacatcagccatgacgatcgtccgggcctgtatcatcacgaagaatacgttgatatgtgccgtggtccacacgtgccgaacatgcgtttctgccaccacttcaagttacagaagacttctggcgcttactggcgtggcgacagcaacaataaaatgttgcagcgcatttatggtacagcctgggctgacaagaagcagctgaactcctacctgcaacgtcttgaagaagccggtaagcgcgaccaccgtaaaatcggtaagcagcttgacctgtatcacatgcaggaagaagcgccgggtatggtgttctggcacaacgacggctggaccatcttccgcgagctggaagtcttcgtgcgcatgaagctgaagtcttatcagtatcaggaagtgaaaggcccgttcatgatggaccgtgtgctgtgggaaaaaacgggccactgggacaactacaaagaagcgatgttcaccacctcttccgagaaccgtgaatactgcatcaagccgatgaactgcccaggtcacgtgcagattttcaaccaagggttgaagtcttaccgcgatctgccgctgcgcatggctgaatttggtagctgtcaccgtaatgaaccgtcgggagccttgcacggcctgatgcgcgttcgtggcttcactcaggacgacgcccacatcttctgtacagaagagcaggttcgcgatgaagtgaacagctgtatcaaaatggtctacgatatgtacggcactttcgggtttgagaaggtggtagtcaagctctcgacccgtcctgtcaaacgcatcggtaccgacgaaatgtgggaccgtgccgaagccgaccttgcggctgcgttagtcgaaaatgacatcgcattcgaatatcagccgggtgaaggggccttctatggtccgaaaattgaatttaccttgcatgattgtttggatcgtgcgtggcagtgtggtaccgtgcagctcgacttttcattaccggagcgtttagacgccacttacatcggcgaaagcaacgatcgtaagaccccggttatgattcaccgagcaattttgggttcaatggaacgcttcattggtattctgacagaagaatacgcgggcttcttcccaacctggattgcaccggtacaggtagttgtgatgaatattaccgattcacaggcgccttatgtcgaagaattaaccaaaaaactgcaagatgcaggtattcgcgttaaagccgacttgagaaatgagaagattggctttaaaatccgcgagcacacgctgcgtcgtgttccctatatgttggtttgtggtgataaagaggtcgaagcaggcaaagttgccgttcgtacccgccgcggtaaagacctgggaagcatggacgttagcgaagtcgttgacaaactgctggcggagatccgcagcagaagtcttcatcaactggaggaataaagtattaaaggcggaaaacgagttcaaccggcgcgtcctaatcgcattaacagagaaattcgcgcgcaagaagttcgcctaactggcgtcgatggcgagcagattggtattgtcagtctgaatgaagctcttgaaaaagctgaggaagctggtgttgatttagtagaaatcagtccgaatgccgagccgccggtttgccgaatcatggattacggcaagttcctctacgagaagagcaaatcgactaaagaacagaaaaagaaacaaaaagttattcaggttaaggaaatcaaattccgacctggtaccgatgatggcgactatcaggtcaaactacgcaacctgattcgctttctggaagatggcgataaagctaaaatcacgcttcgtttccgcggacgtgaaatggcgcaccagcagatcggtatggaagtgcttaaccgcgtccgtaaagacctgtgtgaagatattgatctggccgttgtcgaatccttccctacgaagatcgaaggccgtcagatgattatggtgctcgcacccaagaagaaacaataaggctctcaagtagcctgacccacagcgtgcttgcatgccgtgggtcatgttcgccttactgattcatgttatcaacaatgcgaagtggaattatttataatgccaaagatcaaaacagtacgcggcgccgctaaacgcttcaaaaaaaccgctaacggtggttttaagcgtaagcacgctaacctgcgtcacattctgaccaaaaaatcgactaagcgtaaacgtcacctgcgtccaaaaggccaagtatccaagaacgatttgggtctggttgttgcatgcttgccgtacgcttaaaaatatatccttaaagatatatcactttttttaatcaagaataaaactcaggagagcatatggctcgcgtaaaacgtggtgtgattgcacgtgcacgtcacaagaaaattttaaagcaggcgaaaggttactacggtgcccgttcgcgcgtatatcgtgttgcattccaggctgttatcaaagctggtcaatacgcttaccgtgaccgtcgtcaaaagaaacgtcagttccgtcagctgtggatcgcgcgtatcaacgcagcagctcgtcagaacgacatgtcttacagcaaattcattaacggcttgaaaaaagcttctattgaaattgaccgtaagattctggctgacatcgcagtattcgacaaagtggcattctctgcactggtcgaaaaagcgagagcagctctggcgtaagtcaggtgaaagagggagcttgctccctcttttatattgcattgataaaaccgttaatatttaaggtaatgcaagcatgaatgctgctattttccgcttctttttttactttagcgcctgactcaggaaggctttcgcgcgtaagaaaagaaacggaaaaaagcgctaaagcctccctagtggaggctttttttttgctcttgcccattcgaattcaagatttactcatacttttatttcacatcgggtcacatcggccagaagaagaggaaagcaatgtcacatctcgcagaactggttgccaatgccaaggcagccgtagagagtgcccaggacgtcgccgcgctagatttagtccgcgtcgagtatttaggcaagaaggggcatttgaccctacagatgacttcactgcgcgagttgccagctgaagagcgtccggcggcgggtgcggttatcaaccaggccaagcaggaagttcaggacgcgctgaacgcacgcaagaacgacctggagtctgcggccctcaacgcacgactggccgaggaaactatcgacgtttccctgcctggacgtcgcatcgagaacggcggtctgcaccctgtaacccgcactatcgaccgcattgagaccttctttggcgagcttggcttttctgttgaaaccggtcctgaaatcgaagatgactatcacaactttgatgcgctgaatattcctagccaccacccagcgcgtgccgatcacgacaccttctggtttgatgcgacccgtttgctgcgtacccagacttctggggtacagatccacaccatgaaaaaccagcagccgccgatccgtatcatcgttccaggtcgcgtatatcgtaacgattacgatcagacccataccccgatgttccatcagatggaaggcctgatcgttgataaaaacatcagcttcagcaatctgaagggcacgctgcacgacttcctgaacaacttctttgaagccgatctgcaaattcgtttccgtccttcctacttcccgttcactgaaccttctgcggaagttgacgtaatgggcaagaacggtaaatggctcgaagtgctgggctgcggcatggttcaccctaacgtcttacgcaacgtcggtatcgatcctgaagtctactccggctttgcattcggtatgggcatggagcgtctgaccatgctgcgttatggcgtgaacgatctgcgcgcattcttcgaaaacgatctgcgtttcctcaaacagtttaagtaaggcgggaatatcacatgaaattcagtgaactctggttgcgtgagtgggtaaacccagccatcagcagcgaagaactatcagaacaaattactatggccggcctggaagttgacggtgttgatgccgttgctggcgctttcaacggcgtggtcgtgggggaagtggtcgagtgtggccagcatcccaacgccgacaaactgcgtgtcactaaaatcaacgtgggcggcgatcgcctgctcgatatcgtctgcggcgcgccaaactgccgtcagggcctgaaagtggccgtggcgaccgtcggtgccgttctgccgggtgatttcaaaatcaaggcggcgaaactgcgcggtgagccttctgaaggcatgctgtgctcgttctccgagctgggtattgacgttgagagcgaagggatcatcgagctgccgctggatgcgccaattggcaccgacatccgtgaattcctgaagcttgacgacaacactatcgaaatcagcgtcacccctaaccgcgctgattgcctgggcatcatcggcgttgcgcgcgacgtcgcggttatcaaccagctgccgctgattgaaccagacatgtctccagtggctgcaaccatcaatgacacgctgccaatcgaggttaaggctaacgaggcctgcccacgctatctgggccgcgttgttaaaaatattaacgttgccgctccaacaccgctgtggatgagcgagaagcttcgccgctgcggtattcgttccatcgacccggttgtcgacatcaccaactacgtgctgctcgaactgggccagccaatgcatgccttcgacctgaaccgcatcgaaggcggcatcgttgtgcgtctggctaacaaagacgaagagctgacgctgctggacggcaccacggccaaactgaatgacgacgtgctggttatcgctgaccacaagaaagcgctggcaatgggcggtattttcggcggggcgcattccggcgttaacgcacagactcaggacgtgctgctggagtctgccttcttcaacccgctgtcaataaccggccgtgcgcgccgtcagggtctgcacactgatgcatcgcaccgctatgagcgtggcgtagaccctgagttgcagcgtaaggcaatggagcgagctaccgcgctgctgctggaaatctgtggcggacaggctggcccgattattgacgttaccactgacgctacgctgcctaaagcggccaaaattaccctgcgtcgtgagaagctggatcgcctgattggccaccacgtagaagatgcgcaggtgactgatattctcaagcgtctgggctgccaggttgaagtgcaggcagaaagctgggttgccgttgcgccaagctggcgtttcgatatgcaaatcgaagaagacctggttgaagaagtcgcgcgcgtttacggctacaacaatattcctgacgtacccgttaaagccaatctggaaatgacccagcatcgcgaagcggatctttctctgaaacgtgtgaaaaatctgctggttgatcgcggtttccaggaagcgatcacctacagctttgtcgatcctaaggttcagcaatggctgcatccgggcgaagaagcgctgatcctgcctaacccaatatccgtagagatgtctgcaatgcgtctttcgctgtggactggtttactgacttcagtggtttacaaccagaatcgccagcagagtcgcgtgcgtctgttcgagagcggcctgcgttttgttcctgattctgaagcatatttgggtattcgtcaggatctcatgctgtcaggtgttatttcaggcaacagaaatgaagaacattgggatctggcgcgtcagtcagttgactactacgatttgaagggtgatcttgaagcgattcttgaacttaccggcaaattagaccagattcagttcaaggcagaagtgaacccggcgctgcatccggggcagagtgctgcaatttatttacacggcgaacgtattggtttcattggagtagtacatccagaactggaacgtaagcttgacctgaatggtcgcactgtggtgttcgaaatggagtggaataagctcgcagaccgcgtcctgcctgacgcgcgcgagatttctcgcttccctgcaaaccgtcgtgacatcgccgttgtggtccctgaaaacgtcgccgcagacgatattttggtagagtgtaagaaagttggcgcaaatcaggtagttggcgtaaacttatttgacgtgtaccgtggcaagggcgtagcggatggttttaaaagcctggctatcagtctggtattgcaggataccgctcgtacactggaagaagaggagattgccgctactgttgcaagatgtgtagaggctctaaaacagcgattccaagcatccttgagggattgaacctatggcgcttactaaagctgaaatgtcagaacacctgtttgagaagctcgggctgagcaaacgggatgccaaagacctggttgagctattctttgaagaagtacgtcgtgctttagagaacggtgaacaagttaaattgtctggctttggcaattttgatctgcgtgacaaaaaccaacgtccggggcgtaacccgaaaactggcgaggacattcctattacggcgcgccgtgtggtgaccttccgtccaggacagaagttgaagagcagagtggaaaacgccactccgaaagaataagtcagtctgataaaaaggccgcgtatgcggcctttttttttgctcgcgatttgaaaaaagaacccctgccagggaatgaaggagggggcgcgagatatgaccaaaatgtgtctactgaaaagtatttaatgaaagtgaaaagataacgttaaggtgttgggatcttcaggaatagtctgatagattaaatttcatcgagaaaagggaattatcttaaatcgttttttaaatatttaacgatgcagtttatttaatttagagcacgattttttgttttattgttcagcgttaggacaataaaaaaaggggccgaagccccttgataaagttgtcaatactgttgcgaaaaaatgaaccttagcgagattaatatcggtaatgccaccgacaaacgcttaagttaacatttctcgcgattagtgacctgggccgccgccgtgccagccgccgccgccaccgccgtgataaccgccaccaccgccaccacctggaccccagaacggtgggaataagcagccgctgaggctacaggcaaccagagccacggtaacaaatgccaaaatacgacgcataattattcctttgttagtttaaacagcccgattataaataaaacgaaaaatatctgttgtcagactaacgttaagagatgttagcgcagttatgaaagctgaatgttatttacgcaagagcctattaattcatttctattttgatacaactgttttttaattgtaagcatgccgcaatttatctgaaaatccccagtcttcctagattaagctataattcatcttgttattaaatttctcaggaaataaaactaaggtggatgttgtgaaaaaatctcatttgatgctttgcctcgcattgaccctaccggccgtcgcgcaaatcaacgttgcccaggccgccgtaaacgtcgacgtcaatacgccgagcggttccattcatattggtgaccaagacactcgcggtcactattgggatggttatgagtggcgctcgccgcagtggtggcatcagcaccacaacaagcgcctggggagcgcaacagccgcggtctttactggcatggcgatcgttgggaccctaaaccgccaccaaaacactttgccggtgcagaaaggggcatgcgtcctgaccagggcaatggcacgcacggcgcagagggccatgggcctattccgccaaccagcggtccacatagctaatctcgcgcagtaaaaagcgcggagtcaatgaagctgtcgcaacccgtgcggcagctttttttatcgacttttttccggcaagccgctatttagcgttcaaatctgctattaactgtttaatatgaaaatcagaaacacctaatggcctcaggagcttgccccgctaacatgtcatctaccccttctttcattcagcttgaacagcaacaaaaaagccgtgacgttaaacggctaacggcgctgactctgctgttggcagcggtgctgattttcagcctttgcgcgggtgacagctggctgtggccggatcaatggctgacaccttcggctaaactgtttgtctggcagattcgactgccacgcgcgttggcggtgatactcgttggggcagggcttgccgtttgcggagccgtgatgcaggcactgtttgaaaactcgctggctgagccgggtctgctcggggtctcaagcggcggtggcgtagcgctggtgatttgtgtcctgttgggccacggcctgcttcctatatggataatgagtcttgcggcggttgccggttcgctggcagtcaccttcgtcttgctgtatttcgcccgcaggcggctgtttgcgcattcgcgactgctgctggtcggcgtcgcgattggcattatctgtagcgccatcatgacgtgggcggtgtactttagttccagcctcgacctgcgtcagctgatgtactggatgatgggcggttttggcggtatcgactggcgtcagtcgtggcttggcctgttgctgttgccggttttgctgtggctctgcgcgcaggggcatcccctgaatctgctttcacttggcgcccatcaggcgcagcagcttggtctgcctgtcgccgtctggcgtaatttgctggtgctcgcgatgggctggatagtaggcattagcgtcgcgctagcaggtgtcatcggttttgtgggtctggttatcccccatttgctgcgcttaagcggcataaccgatcaacggcgactgcttcctgcctgcgcgctggccggcggtggcgtattattatcggcggacgtgatggcgcgcattgcgctgtattctgccgaactccctatcggggtcgtgaccgccgttttgggcgcgcccctatttatttggctgctggcgagaggcgagcggctcgactaggcagcattttcatcgattgctgtccagttttcgctattatcacagtgtttaccctaaccacgacaataggatacgaattatgagtcatgcgatttattcaactccactgaccaccattgacggcaaatcaaccacgctgggtgcctttgagggcaaagtgttgttggtggttaacgtcgcatcacagtgcggcctgaccaagcagtatgaaggtcttgagaaactgtatcagtccttgcatgagcaaggttttgaggttctgggattcccgtgcaatgagtttggcgcgcaggagccgggtaccgaggaggaaattcagaccttctgtactacccagtttggcgtgaaattcccgctgtttagtaaaatcgaggtcaacggtgagggtcgacatccgctgtataaagcgctgacagcggcaaaaccgcaggcggtaaaacctgagggcagcgaattctatcagcgattggcaagcaaaggccgtgagccggtcaagcctgaaaacattctatggaactttgagaagttcctgatcggacgtgacggtgaagtgcttcaacggtttgcaccagatatgacgccggaagatcctattttgctcgaggcggttaaaaaagcgctggcgaaataaatcttgtttgggctaaaagggcggaaagtttccgccctgactttattattttcccggcaacagatattggttaatttatgctgaaaataaaacagttggcgctggagtcacgctttttgcccttaagtacccgcgtatctgcgggcgctcgcgtgcatattgtcgggccaaatggggcaggaaagagcagtctgttggccagcatcgccggaatgctaaatgccaccggagaggtatcaatcgacggtcaattaatcactaaactttctggcagagaactttctcgttaccgcagttatttatgccagcaatatttaccgctttcgaccatgccggtatttcagtatttattcttgcatcagccggtcggcgtggagcccgttgtgcttgaaaaaacgttaaacctgctgtgtggaaagctacatttggccgacaaactttcaacagcggtgactcgactttccggcggtgagtggcagcgcgttcgcctggttgccgcattattacaggtttggccaacaattaatccgcaaggtgcgcttttactgctcgatgagccagccaatagcctggatattgcccatcaacgggcgatggacgcacttatcgatgaattttgcgccgtgggaggaatagccctcgtcaccgaccatgacctcaaccacacgctgcatcacgccgattgggtatggttgatgcacaagggaaaaacggtagcgatggggacaccacagaacgtgttacagccagaaaacctgacgcctgtttacgatgttgattttaaattgcagcatttttcaggaaaatcatggattatgaccccttgatgtagaaactattaaatataaataatttcaccgctacgtttttttgtaaaaataaaaaaccgcaaaatttaaaaaagacgttcctaaaataagtttttttcgttaaccttgccagtcaatctcaaaacgccacaaatgttatccaaatcccaactttagttgatttaagacaatgaattaactaattgcccgaaacatcttcttttgcttgccaaatacttgaaaatccttaatgttaaattaagcttaaacgacaataatctattgcactatttgtagggtggcgtttactcttcgttaaataaccagactatacagtttgcgtaactgcatgcctctttgccgtccttaaattacaggatatgctacatggacaactttttacctttctcccgcccttctatgggagatgaagaaatcaaggccgttgagcaagttttgcgctccgggtggataaccaccggaccacaaactcatcaactggaacaggatttttccgccgcatttggctgcaagcacgcgatagcggtgagttccgccaccggtggtatgcacgtcacgttgatggcattgggcatagggccaggcgatgaggtgatcacaccctctcagacctgggtctctactatcaacatgattgtactgctcggtgcagagccggtcatgattgacgttgatccgcacacgctgatggttaaggccgaagacgtagaagccgcgatcacgccaagaaccaaagccattatcccggtgcactacgccggcgcaccactcgaccttgaccctctgtacgacatcgctcaacgccacaacatcccgcttatcgaagatgccgctcactctgcgggcacccagtatcgcgatcgctggattggcgcacagggcacggccattttctcattccatgcgattaaaaacatgacctgcgccgaaggcggtctggtagcaacagacgacgacgcactggctgaaaaagtgcgtgcgctgaagttccacggtctggccgttgatgcctttgaccgtcaggttcagggccgtcgccctcaggcggaggttatcgagcctggctttaaatacaatctgtcggacattcacgcctcgattgccgttgtgcaactcaagcgcctgcacgagatgaacgcacgccgcgcagagctggcgcagctttacctcgagaagctacaggggacgccgttcctgccgatgcaggttcctgaatacccgcacctgcacacctggcacctgttcatgatccgagttgacgaaatgcgctgcggaatcagtcgcgacaggctgatggaaaaactcaaagaggtgggtatcggtaccggtctgcatttccgcgccgcgcacactcaaaaatattatcgtgaacgttatcccgatttgtcgttgcctaacagcgagtggaataccgcgcgtctgtgcagtttgccgatgttcccagatatgcaagacagtgacgttgatcgggtagttgacgctcttaagtccctggtggagaagcagtagtggctcagtttgaagaaattaagaaagtttctatcgttattcccgtttacaacgaggaggagagcctgccggttctgctctctcgaactattgccgcctgtcgccagttaacccagccttttgaaatcgtcctcatcgacgatggcagcacggataattcagctaagctgctgaccgaagccgccgagcagcctgaaaactgtgtcgttgctgtattgctgaaccgcaactacggacagcattcggcgattatggccggtttcaatcaggtctgcggtgacctgattatcaccctggatgccgatttgcagaatccgcccgaagagatccctcgtctggtcctcaaggcagaggaaggttatgacgtggtgggcaccgtgcgctcaaaccgtcaggactcctggttccgcaaaagtgcgtcaaaggtcatcaatatgatgatccagagtgcgaccggtaaatcgatgggtgactatggctgtatgctgcgcgcctatcgtcgccatatcatcgaagcgatgctgcactgccacgagcggagcacttttatcccgatcctcgccaatacctttgcgcgcaaaaccgtggagatcccggtgctgcacgccgaacgcgagtttggtgattcaaaatatagcctgatgaaactggtcaatctgatgtttgacctgatcacctgtctgaccaccacgccgctgcgtatgctcagcgttgtcggcagctttattgcgctgttcggcttcctgctggcgctggtgttgatcctgatgcgtttgatattaggtcctgagtgggcagcggaaggtgtgttcacgctgttcgccctgctgtttatgtttgtcggtgcgcaatttgtcggaatgggactgctgggtgaatacatcggccgtatctataccgacgtgcgcgcgcgcccacgttatttcgtacaaaaagtcatcggtgctcaagccgctgatgtcgatgaagatcaggaaaataaataatgaaagcgattgtttttgcataccatgatattggttgcgttggactgaaagctctggttgaagcgggttatgatgttcaagcggtattcacccataccgactccccagacgaaaacaacttctttgcctcggtagcccgtaccggcgcagaactgaatttaccggtttacgcgccggaagacgtgaaccatccgctgtgggttgaccgcatccgtgatttgcagccggacgttattttctctttctactatcgcaacatgctgagcgaagagctgctgtcgctcgcgccacagggcggtttcaacctgcacggttctctgctgcctcgctaccgtgggcgtgcgccggttaactgggcgctggtgaacggcgagaccgagacgggcgttacgctgcacaaaatggttaagcgtcctgacgctggcgacatcgttgcccagcaggctgtggctatcgacccacaggacaccgcgctgacgctgcacgccaaagtgcgtgaagcggcccagtctgtgctgcagaaaaccctgccttccatgctggcgggtaacattaccctgaccccgcaggacgaatctcaggcgagctactttggtcgtcgcagcgcagccgatggcgagatccactggcataaatcagccacacagataaacaacctgatccgtgccgtgaccgaaccttacccgggtgctttcacttacctgggtcaacgcaagctggttatctggcgtgcgcgcgtgttggagcaggctcacgacaagcagcctggcaccgtactgtctgccgatccactggtaatcgcctgtggcgaaggtgcgctggaaattatcgccggtcagaacgagtctggcctgtatgttcagggttcgcgtcttgcgctggaaatgggcattatgcctgatgtgcgcctgtcttcgcttccgacctctgtgatgaaacgtcgtacccgcgtcctgattctgggcgtcaacggcttcatcggtaaccacctgagcgagcgcttgctgcgcgacggtaaatatgaaatctatggtctggacatcagctccgatgctatcagccgtttcatggacaacccgaacttccacttcgttgaaggtgacatcagcattcactctgagtggatcgaatatcacatcaaaaaatgtgacgtcgttctgccgctggtcgctatcgcaacgccaatcgaatacacccgtaacccactgcgtgtgttcgaactggacttcgaagaaaacctgaaaatcgttcgcgactgcgtgaaatataaaaaacgcattatcttcccatctacctcagaagtttacggtatgtgtgacgataaagagttcgacgaagacagctcacgcctgattgttggtccaatcaacaaacagcgctggatctactctgtgtccaagcagctgcttgaccgagtcatctgggcttacggagcaaaagaaggcctgcgctttacccttttccgtccgttcaactggatgggcccgcgtcttgataacctcgacgcggcacgcgtaggcagctctcgtgcaatcacccagcttatccttaacctggttgaaggttcgcctatcaagcttatcgacggcggtgagcagaaacgttgctttaccgacatcaacgacggtatcgaggcactgttccgcatcatcgagaaccgcgacaacctgtgcgaaggtcaaatcatcaacattggtaacccaaccaatgaagcgagcatccgcgagctggcagaaatgctgctcaagagcttcgatgcgcacccgctgcgtgaccagttccctccgtttgccggcatgaagcttatcgaaagcagcagctactacggtaaaggctatcaggacgttgagcaccgtacgccgagcatcaaaaatgcccgccgtctgcttgattggcagccaacggtcgatatgagcaaaaccattgatgacactctggacttcttcctgcgttctgtagaattgcctgcaaataaaggataaagacttgaccgcaatgaaaaaagtaggcctgaggatagacgtcgacacatggagcggcacccgaaagggtgtccctgagttgttaagacttctggataaacatcaaatcaagggcagtttctttttcagcgttgggccggacaacatggggcgccatttatggcgccttttgcgtccccgctttctgtggaagatgctgcgatccaacgcggcatcgctctatgggctggatattctggtcgccggtactgcctggcccggaaagctcatcgccaaagatttcgcgcccttgatgaagcagaccgctgacgaaggtcatgaggtcgggctgcacgcctgggaccaccagggttggcaggccaaggttgaaaaatggtcatcagaacagctggaacagcaggtgcgtaaagggtcattgcccttgaaaacagcatcggccgttcgattgattgctctgcggtagcaggatggcgtgccgatcagcgggtgatcgacgtgaaagaaaagtttaatttccgctataacagcgactgccgcggcagcgcacctttccgaccgctcctgggtaacggagagttgggtacggtgcaaatccccgtgaccttgccgacttatgatgaagtgattggtactcaggttaccgcagaaggtttcaacgatttcattcttgatgccatcgcgcgtgaccaaggcgtgccggtttataccattcataccgaagtcgaaggcatgtcgctctccgccatgtttgacgatctcctgacgcgtgcaaagcagcagggtatcgagttttgcacactgggaagtttactgcctgccgatagccagacgctgcccgtgggaagggtcgtgcgttcggcgtttcccggcagggaaggatggttgggctgtcaggaaaaaggatcgcaataaatgtcgaacagtatcaaacgcgcctacggtttcatgctgttggtgtttttcgcgctgatttatctcgtcccattggatctgcgctcgctgtggcagcctgatgagacgcgttatgccgaaatcagccgtgaaatgctacagcgcggtgactggattgttccccagtttctgggattgagatatttcgaaaaaccggatgccggctattggattaacaatattggccagatgatcttcggtcattccaactttgcggtacgttttggttccgtattctcaacggcaatgagcgccttactggtgttctggctggcgaacgtcatatggcgcaatcgtcaaaaagcctatgtcgcaacgctgatttatctctcctcggcgctggtctttggtatcggcacctacgcggtgctcgacccgatgattacgctgtggatgacggccgcgatggtgagcagctacttctgcttgcgcgccagcggaacacgccaaaaagccatcagctggattgcgctgggtctcgcctgtgggatgggcttcatgaccaaaggcttcctcgcattggcggtgccggtgattgccgttttacccattgtctggcgtgaaaaacgcttcaaaactctccttggctgggggccactggcgattgtcagtgcttttgtgctcagtctgccgtgggttattgcaatcggtgagcgtgaaccggacttctggcgctatttcttctgggttgagcatattcaacgcttcgccgaaaagaatgcccagcacagtgccccattctggtactacctgcccgttctcattcttgggaccctaccgtggatggcactgctgcccggttcgctgataagcggctggaagaaaaaagcgttacgccctgaactatttttcctgctcagctgggcaatcatgccgctgattttcttcagtatcgccaaaggcaaactgccgacctacatcctgccgtgcttcgcgccgttggccctgttgatggccgatcactttgagcaggttcgccagtcggttacttcgcgggtgctgaaagttaacggtatcatcaacgttcttttcggctcattggcggtcattgcactcctcgtgacctccgggttattgcctctgcacatcaagcctgtctatgggcacgacgaactttacaagctgctcatcgccatactgtgtttcgctgcctgggcgctggccggtgcgttgagtctcacgctgcctcgccgctggtattggtccgcagcttgtccgctggtgctttcgctgctggtcggacaggcaataccgaaccacgttatcgagtccaagcagccgcaggcgtttatccagcaaaatatgcaggttctgcaacagagtcgctatgtgctttgcgatgacgttggttttgccgcaggcctggcctgggaattgaagcgcagcgatatcctgatgttcgacgagaagggcgagttgcagtacggccttaactatccggatgcgcaaggtcactacatcagcggccctgacttcccgacgtggttgctcaaagcacgtgagcagggtgacgtttctgtgatgattaagctggataataaattccagaccacggataacctgccaccggccgacagtgaagccgtttcaggtcgattcaagcttctggtctataaaaaactgccatgaccggttttctcttggtactggtggtgagcattcttacctgtgcagggcagctttgtcagaagaaagccgcacaggtagggcaggcacaggtctcaggtaatctgggacctatcctgcgctggatggttaccgccgtgttttttatgggctgcggcctgctactctggcttcgcgtcctccagctgttacccctgagcattgcctacccgatgctgagcatgaactttgtgctcatcactttcagcgctcgcggattctttggcgaaattattgaccgcagacactggcttggcgtggcctttattatgttgggtattttgctgatggggataagcggatgaaagggttcggatggggcatcgccagcctgctgctggtcagtatggcgcagctgatgatgaaatggggcatgacccacatgccgacgttttcactgaacgccaacctttattcattagtaatgaataacctgctgccggttttcattgtctgctgcggtattgcgggctatgcattatcaatggtttgctggttcttcgcgctgcgtcagctgccgcttaatcgtgcttacagtctgctcagcctgagctatgcgctggtctatctcggtgcggtttcgctgccgtggtttaacgaaaatatgcactggatgaagtcattgggtgcattatccattcttttcggcgtctggctgatccacagtaaaacctcctctcaagcgccggaataacggcgctttctcagattttcttttgcaaaactcagcgatttttgttggatggcggataaaatagcgctaaattctttaagtccttagataacggcaagttatcttctccaccattttccagcgtggaatgatttcaggatgtcggccagggaacaaaagacatgcaaaagcgctcaagacttttatattcactgttggcattggctgtgcttattctcggcggctgtagcagtcacgcgccgatgcccagcggcagtctggcaaactcgcgagttgttgtcgcacagttaaacgatcagttgggcagatggcacggcaccccgtatcgctacggcggcctaagccgtaacggcatcgactgctcaggctttgtgttccgcaccttccgcgatagatttggcgttatccttccgcgcacgaccgccgaacaaaccgaggttggcaccaaagtatcacgtaaagaactgctgcccggcgacctggtgttcttcaagacaggcgctggcgaaaacggtcttcacgtcgggatttatgattcaggtgatgcctttattcatgcctcaaccagtcgaggcgtggtgcgatcgtcactggacaacgaatactggcgcaaaacgtactggcaggcgcggcggatttagtccgctatttccatgtttataatttaagcaatctttagagcaattttcccctaggctccacgcttcgcaggacaccttattatgacggctttacgtcttctactttccgattcttacgatccctggtttaatctcgcggttgaagactgcatctttcgccaaatgaccacccagcgcgtgctttttctgtggcgtaatgccgaaaccgtcgtcatcgggcaggggcaaaatccctggaaagagtgcaacaccgctcgcatggcgcaggacggcatccgactggctcgtcgcagcagcggggcggcgcggtatttcacgatctcggcaatagctgtttcaccttcatggccggcaagcccgagtatgataaaagcgtttcgacgcagataatcctcaatgccctgtcgagcctgggaattcaggccagcgcctcgggtcgtaacgacctggtcgcgaccactgccgaaggcgagcgcaaaatttcgggatctgcctaccgcgagacgcagacccgtggtttccatcacggcacgctgctgttgaatgccgatctcagtcgtctggccaattacctcaatccggatcccaaaaaacttcaggcgaagggcatcacttccgtaagatcacgcgtggcaaaccttaacgaatgggtgcatgacatcgatcacgcacgagtctgtaaggcagtgagtgaggcattttttgagtggtacggtgcccgcgtcgagccagaggttatctctcccgacgttttccccgatcttcccggttttgccgagcagtttgagaaacagcgcagctgggactggaattttggcaaagcgccggacttcagccatgaattaagtgagcgctttgtctggggtggggtggaggtctatttcgatatcgagaaagggcgcatcagccgcgcacgtctgtacaccgacagccttaatcctgctccgctccatgatttcgcaaacaggctggtgggcggtaagtattatgccgacgacgttatcgccgccgctcaggcttcctgtgccgccttcccggagttcagggcggagctcactgagcttcagggctggatggtgggggtattcgttaagcgttaagatagtgcagtaataagacaggggaggaaacgttaattggctattccgctgttatggtctgcctttgttaagttgtatacatagcctatgattctaagagccaatatgaacgtcgtgaacagcagactttggcagaagagcagacagacgttgcatggaagagggggctgagcccctagcaggataagtatttgttgtcaacatgatggcccgagtcggatgctggcatcaagactcttcagaatagacctgcgactgatttttagctgagtcagaagcgttttccggagtcgagaacgcccataccatcgccaccgcccagcctataaccgtccaccccagcagcaggtttacgccaaaaataaccggtaattttttatgttttctatgatcggcaatcaaaaaaggcagaaaatacatcgcgacgcaaagaataaccgcgacgggaactaacatctcaccagtactcattaacaattcactgaaaataatggggtaattcggtactttaaaattgttatttgcaaatttcaattgataaagcattcgctaacaatgttttattccggtgcttccagccgctgaaacagcataatatttggcagtatcagggcaatatccctattttgccctgatacgctatatcaccgttttatgactcccagccgaggcccaaactcttctgcaaggccacatagtccagtgccaggtcggtctgcgactggattcgcttctggctggcattcagctgcgtacgctgggtatcgagtacgtcaatcagactggcaacgccagcaccgtagcgctgcttcatcagccgttcgtcctgacctgccatcgtctcaaccgtcatgtagttcaccagcgtgcggcgctgttcgccgtagcgggaaagagagccattggcgtcgcgcagcgcattgagcacggttttacgccattcagcctcagcctcatcacgctgtgctttcgcgacgttgatttgcgaacggatacggccaaaatcgagaatattccactggagcatgggcaccagcagccacgactcatttccgtggctgaacatctcgctgctggtatcgctgctaaatcccagaatgccgcgcagggtaattttcgggtataggtcagccacgtgttcgcccacggtcgcggtactggcagccagtttacgctcggcgttgcgtacgtctggtcgacgacgaatcaggtcaaccgggtcaccgacgttaatttgctgcggctctgccggtaagactacggctcccgagagcaggttatccagtgcgcccggcgtcaggcctgagagaaacgccagttggtccttgtactcattgatttgcgcaatctgattcgggacctcggcctgactgttttccaaatcggtttgcaggcggtgaacgtcagtatcgttcgctgctccgcgcgactggcgctgttgggtcaatgcgaccgtttgctgctgcaacgcaatattcttttgcagattggcaagctgttcctgtgcgccgcaaagctgcaaataattgctcgcgacctcggcggcaatcgacacctgcgtatctgccagactggcctcgctggcctcttgctgcgctcgtccagcttcgacagtacgacgattctgtccgaacaggtctagctcccagctggcatcaaagccgctgctataaagatttaccggattactgataggcagtgcggtgccggtttccggcagacgcgcacgcaccattgccccagtggcgtcgagtttgggcatctcctgagcctgatcgccagccaacgccgcgcgcgactgctgcagacgagcacgcgcgatatcgatatcaggattatgctgcattgccttgacgatcagctggttaaggcgttcgtcatggaaggccagccaccactgcgactgggcctgcccggtgctgacgcccgagttaggcaggcgagtaaacttggccgtcagcggcacgcctggcgcaccgtgatagtctgggcccacgctgcaccctgcgagcaacatcgccaggccaccgagcggcgctaaacgcatcaatttattgttcatagtctgtcacttattagtcatacgcggcgcgcgcagcagcagcgccagcggaatacagcacaccagcgccataccgagcacgaaaaatgattcggaataggtcatcactagcgcctgctgcgagatttcattagccagctggcccatggcctgcatttttgcatgcaccatatcaccagtctgactgaagaactggctggcgctgccggaaatacggctctctgccagcggagagttggcggttaccgactcgcggagcacgtcgtcatgcatttttcgctgccgatcgatgaagattccgagcaaggccagcccaacggagccgccaaggttacgcatcatgttgtaaataccggctgcgtcggcgacttcatcgtcattgacggcggccattgaggcctgattcagcggcatcattgccatgatttgtcctgcaccgcgaagcagctgtgaccagaagaagtcatcgccggtactttgtgcggtcagtgaaatatcgaggaaacagctgacggcaaagaggataacgccgcagatgaccaacaggcgcgtgtccacgctgcgcaacatgcgcggcaagataggcatcatgatcaggctcgggacccccgagaccagcagcaccattcccgactgctgtgagttgtagcctgccacgccgctcagaaactgaggcagaaggtacagcacacagtacagacccatgccgacgacaaacacgatcaccagcacgctgacgtagcgcggattacgcagcagcgagagccgaataaccggttttttcgccgtgagctgcgcgatgctcagcagaataaagccgagcaccatcgcgatggagagggtgacaatcatcgtcgaatcaaaccagttgtcgcgctgaccttcctccagtaccaccgttaggcaacttagcccaacgctcatgccaataatgcccagccagtcggcctccatgaagccttcccagtggggtttctccttcggcaggccgttgaataacagcagcatcagcccgataccgactggtaagttaaggaagaagcaccagttccagctgacgttttcggctagccaaccgcctaacaccggccccattactggcccgagaatcacaatgacgccgaaaatcgacatccctaacggcagctgtcgccgcggcaagcgggtacgaatgatcatctgcgcggtggggatcatcgccctccgacaaagccttgaccaacacgtccgatgatcatctgcgtcaggctgcccgacgtaccgcacatgacggaaaaacagatgaagagcagggcgcaccacattaagaagttacgcagcccaagcaggcggctgagccaggcggccagcgggatcatcactatctctgacagcagatacccggttgaaatccaggtgccctcggtgccggtcgcgccaatttcgccctgaatttgcggcagtgcggagttggtgatagaaatatccagcgtcgccatcagtgcgccaagcgcaccggcaaataccgcaacccagtccgttaccgaggcgctgggctgctgggtagcgggaaggacggtgctgctcatggctgcgcctgctggttaggatgcgtatcgacgtcaacggtcaccgacataccggccagcaaacgtttcgctgcatcgcttttgtcggtaatgcggatgcgtaccggaacacgctgcacaattttggtaaagttaccggtggcgttatccggtggcagtaaggcgaagagtgaaccggtgcccggagcgaagctgtcgactacgccgctgaaatcatggccgggaaacgcatcaacgtgcagcgtggctttctgacccggcagcatatgggtcaactgcgtttctttaaaattggcaaccagatacagatcgttttccggaaccaccgtcagcaggcgagttcccggctgaacatattggcctacgcgtaccgcacgatcgccgacgcggccgtcaagtgggctgtataccacggtgccgtgataatcgatgttcgactgtgcgcggtttgcttcggcagaggctaactgggctttcgcctgctcaatttgagcatgcattgactgaatctgtgctgaagctgattttacggcggctacgttagcgtcataatcggcctgagcctggtcacggctgcgacgaagctcggcgagcttctcctgattttctgcaccgctggctgccaatggcagatagcgctgatattcatgatttgaatagttaagctgcacgagagcagaccgctgctgcgcctgagcctgttcaatctgggcgttctggcgcgttatctcggcattagcctggtcgatggcggcctgatcggccagaatattggcactggcctgattgaggcgcgcctgatactggtcgtcttcaatctgtaccacgggttcgcccgccttgacccactggttgtccttgaccagcaccttggtgacgtagccggaaattttcggcgcaagcgtgacgctgtccgcctgaacataggcgtcatcggtggattcgttaaagcgagcaatgaagaaccaatagagtgaagccagtaccaaaaccagcaccacgcagaacgccagtcgcagcaaaatacggcgttttttgctggattggggttgggcgttgacggtgggggcggcctcggaggacgcaatcatggatgcaagtaacaaagtgagaacctttttagtgaaattattccgctcgagataaatattccaaatggcacaattgtgtcaagtgatatacttttattatgcaatttgactgttataattcgcatgttttgctacaggaattgattcatgaccgataacgctctttctaaacagctccgccatccccttccggcggctacgcgcgcggtgacgaaacccgacaacgtattatcgaaagcgctattgttctgtttggcgaattaggctttgaaggcgcatcgacgcgcgcaatcgccaggcatgccggtgtcaatacgcccgcgttgcagtactatttcgagaataaagaaggcttatacgtcacctgcgcagattatcttgccgaagagagttacggctggttcgagccgttgcttacgcgaattagcaagcttgagaatcccgaccctgatacctgcatcgaaatgttctgcctgatgcttgaaacggtgctggagcgcgtgctgaataaccgcgccgtacatcagcgccgactttttcatgcacgaatcaaaatggggcagggcccggaaaaggcctccttgctgtttcaggaaaagcttatcgaccacgtccatcgtgcgggcgtcaaactggtctcgaggatatcgggcaacgcggtagataatgaacgtacacaaatcagagtgttatccctgtttgggctggctacaacgttttataccgtgaaacatcccgtgtttaacgctgacgaagaaggtcgccagttcccggccgagcagatggcattaattaaaagcaacgtccgtgagcagtgccaggtattgatgcgcagctggatggtttaagaggcggttatgtcgcaaaaagttatgccacaatttgaacaccgttatctcgacgaactccccggtttttataccgaattgcagcctacgccactcgctggcgcgcgactgctgtaccacagcgagcccctggcggaagagttggggctggactcgtcgttattcacggcagaaaattcaggctactggagcggccaagcgctgttccctggcatgaaacctctggcgcaggtctacagtggccaccagtttggtcagtgggccggccagctcggtgacgggcggggggtattgctgggcgagcagaagcttgaagacgggcgcatgctcgactggcatctaaaaggcgcaggcctcacgccatattcacgcatgggggacggtcgtgcggtacttcgctcggtggtgcgcgagtttttggcttccgaagcgctgcaccatctcggcattccgaccactcgtgcgctgaccattgtgaccagtgacgagccggtctatcgcgagacgacggagcgcggcgcgatgctgattcgcgtagcgccgagccacattcgcttcggccatttcgaacacttctactatcgtaagcaacctgagcaggtggcgatgctggccgattatgccatcgcacacttctggccagcgctgcaaaacgaggctgaccgctaccgcctgtggttgaccgacgtggttgaacgcaccgcacgtctgattgccaaatggcaaagcgtgggctttgcgcacggcgtcatgaacaccgacaacatgtcgatcctcgggctgaccctcgacttcggtccttacggcttcctcgacgactataaaccggatttcatctgcaatcataccgaccaccagggccgttatagctttgacaaccaaccttccgtggcttactggaacctgcatcgtctggcgcagtcgctttccggcctgatgagcactgaagatctgcaaaaagcgctggcggcttacgagcctgccctgatgcttgaatacggcagattgatgcgcgccaagctcggcttctttaccgagaacaagcaggacaacaatatcctgaccgggttgctaagcctgatggcgcaagaggggcgtgactacacccgcaccttccgcctgctgagtggcgttgagaaaggagaaacgcgttcggcactccgcgacgagtttatcgatcgccaggcgtttgaccaatggtacgaaggttatcgtcagcggctgttgctggaagagcaggacgatgcgacgcgtcagcaggcgatgaaaaagattaacccacgtattattctgcgcaactatctggcgcagcaggcgattgaaggcgcggaggttgacgacgtcgggcgtttgcaggcgctgcatcttgcactacagcagccgtacagtgacgatgctcgctttgatgagctggcagcgctgccccggactggggtaaacaccttgaagtgtcctgctcgagctaaatgtttgggtagaaatcctccctgataatccatgcatcagggaggaaactctgattattgtctgaggaaaacctgaggaaccgggctttcgggatgattaatcacgcccagatccgcgcggtaccaccgttgtaacacgtcggcctgcagcacctctttcggcgttcctgccgccaccaactctccctgatgcaacaataaaatcctgtcggcgtagagtgctgccagattcaagtcatgcaggacgcagcagaccgccagcggcgactgtctcgtaagacggtgcaacagacgcaggctgtgctgctggtggtagaggtccagtgctgaagtcggttcatccagaaacagccagcgcggcgagggctttgcactccagagctgaatcaagactctggcaagctgcacccgctgttgttctccgcccgaaagctgtcgatagtcacgctcggcaagagacagacagtcggtttgctccagtacctgttgcaaagcctgctggagttgcgcgttattgtgcggcgaccgccccagtgtcacgacttcacgcacgctgtaaccaaaggccagctcgctgttttggcgcattacggcacgagtgcgggccaattccagtgggtcccagtccgtcagtggacgaccaaccagcgcgcaatcccctgaatccggcgtcagatagccggtcaacaggcgtaacagcgtcgatttacccgcgccgtttgggcctattaacgcgaccagttcgccgcttgacagctgtagagaaatatcgctgataagcctgcgattggcgaccgaataacagagattactcgccgcaagccgatgctgcgcctgtgtcgcgtggtctgacaaaatagcctcattcacggcgttgccctcctgcacgtaaaatcagccatagaaaataggggccgccgaggatagcggtgagcagaccaaccggcatttcggcgggggcgaccagcgtgcgggcgagggtgtcggccaacagtaacaggcaggctccgcccaatgctgaacctggcagcagccagcggtgatcggccccgatttgcatacgcagcagatgtgggatcaccagtccaatgaagccaatgatgccgcaaaccgccaccgatgcaccgaccagcagggcgctcagcaaaagtaaaatacgctgcgttcggcggacattaacgccaagataatgggcatcttcgtcgccgagctgcagcaggttcagcctgcgtgccaggaattgggtcgcgatgctgaccggaacaatcaccgacgccgcaaccgtgagcgttgaccactgcgcttgtcctaaggatcccattccccacatcgagaactggcgcagctgactgtcgttgctgatataggtcaacactccgacggcggccccacagatggcattgatagcaataccggccaacagcaggcgcgacaggccgttttgccccatgcggctcagcatgaatacaataaatgagataaccagactgcccgcgaaggcgctaatcatctggctgtagagcactatcaccggtggaagagagagtggaaagactatcatcagcccaacaaacagcgctgcaccgctgctgatacccagcaggccggggtcggccagtgggtttcggaacacgccctgcattaccgtgcccgagcaggcgaggccacagccgacgaccatggccaaaagtatgcgcggcagtcgaatcgtcatccaaatttgccacagctcgttatcaaacggccggcgcagcagagcgggcagcgaaacggagatagcgccgctgttggccgccaacaccgccagggtaatcaacagcaacgccagcccgagcaacatccgaagctgagcagggatccgctgacggagtggcgtgctgagggtactcatttcgcctgttccgccgccagacgcagcttagccagcactgccggtgtttccagcccgaagccgagcagggccatatcgtcaacgaccagagcgcgcttgtttctgcccgctgggtcattgccagccccggcagtttccagacattatccagaccgccgagcgtcttcacgccgtccgtcgttagcagcaataaatctggcgcggccgcaacaatgccctcttgcgaaaggggcggtagcggctaaagccctgcatcgcattctgcgcgcccgctgtggtgatgattgaatcggctgcggtattttgccccgcggccatcgaccccatcccgccgtggctcattatgaatagaactttaacgtgcagcggggagcctttaacggctttcagctgactgcggaattcggcaatcagcttgtcaccttccggtctgcgattcagcgcatcggccacgacctcaatcttttgaatcaccgtgtcgagcgtaggattgccgggcacgcgcaccactttcacgtggctttcagccacctgctgtagcgctagcgagggttgtgcgaggtctgaggtcaggaccagtgtcggcttggtcgataaaatcccctcggcgtttagcatgcgcatgtaacccacatcaggcaattgggtggcctgagagggatgtgtgctggtgctgtcgcgagcgaccagctcactgcctgcgcccagtgcgtagacaatttcggtaacatcgccgccgatgctgaccacgcgttcggcggcctgcgccgaggccaactgagtcaagaaaaggctggctaacgcgattttccacccttttttcatgcggctacgccttgtacggtgagcgttgagatctggtcacgccaggcgctttgttcgggtttaccttcggtacgctggccaaacagctgagcaatctggctgccgtcagcggcgaaaagctcgagactggtcacgaaaccgtctttggttggcttgcgggtaacccagctttcggcgatcgccgtctcaactacgtgcagagtgaagcgctcattgaatacgttaatccactcgccgtgaggcaatactttttcaatttcaccggtaaagatttgtacgcagcctttgttgctgacgaaaatcatgatttcgtttttgtaatcgcaggcgacgttgaggatttgcgtcaatgagccgttatcaacctgataggccaggtcttcacctacggcgcgaaacgcctgctggcgagtcaggccgcggcggcgcaggatctggaagaactgatgaacgtcggtcatctcgcgccattctgcgtcgagcccttgcgtgtcaccggctgccggtgcaacgacgtcagcaggcctcaccgccagcggcaggggggatcgtgcgctaaattgttcaaccagcgccgcccatttctgcgcatcggtttcatcggtggcatagaccttatggaccgcatagccctgcgcgtcgaagaactgcaggctgtgacgaggccccttaggcgagtcttccgtcagcgcaaaaacagactgccattggctcaggaacaggcgcaggtccagtgcgcgagggttaagaattaatcctgcgtggccgttgagatgctgatttttgtattcgccctgttgttcatgaacggcaaattcattacgggtaattgattttgtccccccgacattttcaagtgcagccagcagagtacgtacctcgacatccagtcttacggcatcgtatccgacgcgtgtattgaggagttcggcttcactaatacccagaatactggctaaatcccgggcatattttcctgggttctgtgctttagcttgcagataagtttcatggctgacttgggtcatgggtttctcgcgaatgaagagtggacacaaaaacgttaatgttaaatggtaatcaatatcaatatgataatcattatcaatttaatgtcgagctacatcaagttaattttcattaccttgtgaacgggaagtgccgtcagccaagggctgagcgtaattttcatctaaagcagaaaataaaaaaggggccataaggccccctgataatcctgcatgcttttttctgcttacaggcaattaagcctgaaagcggctgcgggtggcatctgccaacatctccagcagggtctcggtatcttcccaactgaggcaagggtcggtaatagacttaccataaaccagtggctcaccgttgactattttctgagtgccctcctcgataaagctttcggccatgataccggcgataccgttaccgccatggcggatctgctcacagatatctttcgcgacgtcgagctgacgacgatgctgcttctgacagttaccgtggctaaaatcaaccaccagacgctgcggcaaatcaaattcagccagattttcacaggcctgagcaatatcttcggcgtgatagttaggcgtcttaccgccacgcatgatgacgtgaccgtaaggattcccggaggtgcgataaaccgtcatctggccgtttttgtccggtgacaggaacatatggctcacgcgagaggcacgaatggcatcgatagcgatttgcgtgttgccgtcagtcccgttcttaaagccgaccggacaggagagggccgacgccatctcgcgatggatttggctctcggtcgtacgcgctccgatggctccccagctaatcaaatcggcaaagtactggccaatgaccatatcaaggaattcggtcgccgtcggcaggccaagctcattgatagccagcaggactttgcgtgcgagttcaatgccatggttaacgcgatagctgccgttgaggtctgggtcagaaataagccccttccagccaacgaccgtacgcggcttttcgaagtaggtacgcatgacaatttcgaggctgtcttggtacttttcgcgcaatacgtttagcttgcctgcgtaatcgatagcggcttcgatatcatgaatagagcaagggccaacgatgaccagcagacgtttatcttcgccgctaatgattttttctatgcgctgacgcgatgcggtaacattgtctgcgacggccaaagagattggcagggtatctgccagcgcctttggcgttatcagactaccaacgcgcgtggtgcgcagttcatctgtttgtgacatgtgaattgaatctctgaaattttgttcttcgcagcggcaggagtgccgggaagtgatgaatgtcacaataacccaaaatcagatcaattcaacacccgttagcacgtaataatgcctctatccgcaaattccagcataaatctttcgttcttgacctcagagcagtgttagctgcgctcattgacccgaataacctccctgcgtaagcttatcgggatttattcccgcgtccgttcgtcgcatcagaacatgcggcggctcatgccgaagctgtcgagaatttttgccgaaatctcttctacggagtagttggtactgttgaggtagcgaatctgattttttctaaacaatgcctcgacctcggagacttccattcggcactgtctgagcgaggcgtagcggctgttttcgacccgctcctggcggatggccgacaggcgttcagggtcgatagtcagaccgaaaagcttgtggtgatggggtttgagggccgccggcagctgaatgttgtccatgtcatcggcagtaaacgggtagtttgcagcgcggataccaaactgtagtgcgagatacaggctggtgggggttttgccacagcgtgagacgccgatcaatatcacctgcgcctgttcaagattacgcagtgaaatgccgtcatcgtgcgctaacgtgtaatcaatggccgcgatacgtgcatcatatttactgatgttactggccgttaaaccgtgagttcggttggcgattggcgaagggtctacccccaactcattttgcagcggggcgaccaatgcctgaacaatgtcctgacaaaaaccctgactgctggcgataatatcgcgcacctgggtcgaaataatggagtagaacaccaggggtctgacgccggttttctcgtagatgtcgttaatttgctggcacacggcctttgcacggccttcgttttccacgaaggggagagaaaaggtggtggcattgaccggaaactgtgacagcacggcgtggcccaacacttctgcggtgatggctgtgccatcggaaatatagaatacacacctgtccatgagcttccccgaactcttaatctttcacgtagcggcggcgtttgccgttttcccgttgcgtgaaatctttgagttatctttgtctgtaaaaataatattttcattattaacgtgtttttccgaaattaaaaagtgctgtctcacattcctgtcgggttttcgagaccctgcgcaaaactcttgcaaaccgtgaaaccaaatcacggatctttcggcagagttccagactttgcgacagacttcagcttctcttcagccattagcgtaaggttaaaatatcaagcaatatgaggctggacgatggctgatttacaaaagaatttcatttttttgtgactcggataaaagaaagaaacggtgaaaattcttaaagcgaaaattattgaatagctgtatcgattcaccagtcttatcaatatggatcattatgctagtctgaaaacgttgagcgcttctcaaccgcataatttatgaatccgttattgactcatactctccaattttcgccctataaatagaaaggattgtttcatggccaatcttgacgctgatttgcgcaatattctctggtacaaccagttgggtatgcacgatgttgacaaagtagggggcaaaaatgcgtcccttggggaaatgattactaacttgtccgatctgggcgtttcggtgccaaacggcttcgcaacctcttctcaggcatttattaatttcctcgatcaaagcggtgtcaacaagcgtatctatgatctgctcgatcaaaccgacgttgatgatgtggctcaactggccaaggcagggtcacagattcgacaatggattgttgaaacgcctttccttccagaaatggaaaaggatcttcgtgaagcctatcagcagctgtctgaaggcgagccggatgcctcttttgcggttcgctcctcggcaacggcagaagacatgcctgacgcatcatttgctggccagcaggaaaccttccttaacgtgcagggctttgacgccgtgctgacggcagtgaagcacgtttatgcctcactgtttaacgaccgcgcaatttcttatcgcgtgcatcagggctatgatcaccgcggcgttgcattatctgccggggttcagcgcatggtgcgttctgacctcgccgcggcgggtgtcatgtttactattgataccgaatcaggcttcgatcaggtggtcttcatcacctcagcctatggtctgggtgaaatggtcgtgcagggtgcggttaaccctgacgagttctatgttcacaaaccgacgctggcgaaaaataaaccggctatcgttcgccgcaccatggggtcgaaaaagatccgcatggtttacgccgacagtcaagaacacggcaaacaggtgcagattgaagatgtgcccgaagagctgagccaacgcttttcactgaccgatgcggaaattcatgaccttgcacgtcaggcattgctgattgaaaaacactacggtcgcccgatggacatcgagtgggccaaagacggtcacaacggcaagctgtatatcgtgcaggcgcgtcctgaaacggtgcgttcgaacggccaggtgatggagcgctaccagctgaatggcaagagcaaggtgctggtagaagggcgtgccatcggccatcgcattggtgcgggtccggtcaagataattcataacatcagtgaaatgcatcacgttaaagcgggtgatgtgctggtgaccgacatgactgaccctgactgggaacctatcatgaaaaaagcgtcggccatcgtgaccaatcgcggcggacgtacctgccacgccgcaattatcgcccgagagctgggcattccagcagtggttggttgtggtgacgccacagaacgtttaactgaaaaccaaaaggttaccgtttcttgttcggagggcgacaccggctatgtctaccaggacgagctggacttcagcgtacaaagctcagaagtgaacgagctgccaacgcttccgctgaagataatgatgaacattggtaaccccgatcgcgcgttcgactttgcctgcctgccaaatgaaggcgtggggcttgcgcgtttggaattcattatcaaccgaatgattggcgtgcaccctaaagcgttgctggaatttgataaacaagagcccgcgctacaggaagagattaaaaagctgattcagggttacgactcacccgttgaatactacgttgcccgtttgacggaagggattgccacgctgggagcggccttctggccgaaacgcgtcatcgtgcgtttgtcggacttcaagtctaatgaatatgccaacctggtgggcggtgagaagtacgagccgcatgaagaaaacccgatgttaggtttccgtggtgcaggtcgctacgtgtctgaaaacttccgcgactgctttgcgctggaatgcgaagcaatgaaacgcgtacgtaacgatatggatctgaccaacgtagaagtgatgatcccgttcgttcgtaccgtggctcaggcggaggcggtagtagctgaactcgcgaatcagggtctcaaacgcggagagaatggtctgaaggtgattatgatgtgtgagataccgtctaacgccctgctggccgatcagttcctcgagtacttcgacggcttctctattgggtcgaacgatatgactcagctgacgctgggtcttgaccgtgattcaggtgtggtctctgagctatttgatgagcgcaacgaagcggtaaaagcgctgttgtcgatggctataaaagccgcaaaacgccagggtaaatacgtcgggatttgtggtcagggtccttccgatcatcaggattttgctcaatggctaatggaagagggcattgatagcctctccctgaatccagacaccgtggtgcaaacctggttggcgcttgctgaaagcaaataatcgctaacagtctgattgtctttattattagccgcgaatacagtttttcgcggcttttttattcggatgtaaataagaaaatgttgttaatagaaactattaatgagtgtcttaggtaaaaatatatttcagataaatccaaaattatttttaatcattaaaataaaatttataaagtgttgcgttacgttatagaggtgattatataaaggcgggcgctgcagtgggcactggatatattacgccagtttatttttgacaaaaaaaaggcccgtcgagatgacaggcaaagactacacacagcaattctttggtaatgcaagcttgggggaaagcctacatataaatcatggggttgttgattcaactgttaataatactaagatccaacaggatgttagtctctaagaattgtcttaataggaaattttaactgattctcttatcaggcctttttaatagcaaaaaaatttagttagaaatagcctgcaaagggggatgaaaaaataaaaaaaaagccccgaagtcattaatactccggggcagtattaataaacagattattccctagcaacttgttaacctcttcgaggtcttgctgaggctcaggggcttcattgacccataaagaaatcaatcggtaagaaacggctaacaccacagggccgataaataaaccaataagaccaaaggcaaccaagccgccgataacgcctgaaagaataaggagcattggtaaatcggcacccatgtggattaagtacgggcgcagtacgctatcaagcgagccaaccacacagctccagaccagcaatacggttccccaggtgttatcgcctgtccaatacagccagatgatggcaggaatcagcaccagcagcggtccaatttgcgccacgcagcaaacaaacatcaccacggtcagcaacgtggcataggggatgccaacgatggccagaccgatgccgccgagtaccgactgaacgatggccgtgacaaccacgcccaacgccacggcacgaatagcttgacccgccagtatgaccgcggcgtcaccgcggccacccgccagacgaatggcgaaatggcggatgcccatcccaacgtgctcaccgcgatagtaaagcagtgcgctaaacagcagcattaatgaacagtgtaaaatgaagcgaccaatgttggccgcctgcgagacgaaccaaccggcggtttgcccaatgtagggctgtactttcgccagtaatgcactgccaccgctgttgatcagggtatgccagccaagataggtcttcttgccgataagcggaatcgactccagccaggtaaagtcaggcaggtgcagctgtgaagggttgctcgccagttttgccagcggcgcgctgttttcaaccgcactgctgataagaagggcaatcggcaaaacaaacagcaggataagcagcaccgtcatgacgataaccgcgagtattctacgcccccagaggagagcctgaattcttatcatcacaggccaggtggcgatgactatcattcctgcccatgaaaagcccagtataaatggtttcactacccaaatactggcaatggtcatcaaggcaataaacagcacgccaaacatgatttgtggcaaatcataatttttgttcgggagattcatcagtcattctcgtttcaaaagcaaagcatcatggccataaaaactggcatcaatctatcctcataagcatggagtattatcaggggttttagaagcactagaaaacgaagtatggtagtttttaagttgctttagacagggtgggtccgttttacggatccagcggccgcctacaggcctgcaaacaacaacaaagacagagtcgtaatcaatgatcccacaaatttctcaggcacctggcgttattcagcgggtgctcgactttttggaagcgttaaagaaagacggttttacgggtgacatggcaaccagctacgccgatcgtctgactatggcgaccgacaacagcgtctatcagcttttaccggatgcggttttgttcccgcgcgctacttccgatgtcgccttactcgcccgccttgctggtcaggaccgcttcaaaacgctggtatttactccacgtggtggcgggaccggcaccaatggacagtctcttaaccgcggtatcgtggttgatatgtccagacatatgaatcgcatcctcgatattgataccgaagccggttgggtaaaagttgaagcgggtgtcattaaagaccagctaaatgaattcctgcgtccgttgggctatttcttctcccctgaactctcgaccagtaaccgcgccacgctcggcgggatgatcaacactgatgcctcagggcaagggtcgctggtttacggtaaaacctcggaccacgtgctcggcctgcgcgcggtggttttgggcggcgaactgcttgataccaaagctatgccgacgctgcttgccgaacagttgggcgaggagaaatcgaccaccggcaacatttatcgcacggtgctcgaaagctgtcgcgaaaatcgccaacggatcatcgacaaatttccgaaacttaaccgcttcctcaccggttatgacctgcgccatgtcctgagtgacgatctgcaaaccttcgacctgacccgtattctcaccggttctgagggcacgctggcctttattaccgaagcgcgtctgaacataacgccgattccaaaagtcagacgtctggtcaacattaagtatgactcgttcaactctgcgctacgcaacgccccttaatggtcgaagctaacgcactttcggtagaaacggttgactccaaagtgctgaatttggcgcgtgaggacatcgtttggcattcagtgagtgaatacatcaccgatgtcccaggcaaagacatgcagggcctgaatatcgtcgagtttgccggtgatgctcaggaactcatcgagaagcaggtcgagtccctttgtgaacgtcttgacggcctgattgccgaagagcagggcggggtgatcggttaccaaatctgtgccgatctggcgggcattgagcgcatctataacatgcgtaaaaaatcagtcggcctgctgggtaacgccaagggcgccgccaagccgctgccttttgccgaagatacctgcgtgccgccagagcatctcgctgactatatcgtcgagtttcgtgcactgctggacagccataaccttagctacggcatgttcggtcacgttgatgcgggcgtactgcacgtgcgtcctgcgttggacatgtgtgacccgcagcaggaaatgctgctgaagaaaatttccgatgaggtggtcgcgttgactgctaaatacggtgggctgttgtggggcgaacacggcaaaggattccgcgccgaatatagtccggcgttcttcggtgacgagctgttccacgaactgcgccgtatcaagaccgcgtttgacccggccaaccgcctcaaccccggcaagatttgtccaccgcttgactgcgacgagccgatgatgaaggttgatgcgcctaagcgcggcacccttgaccgtcgtattccggtcgaggtacgcaccgcgtttcgcgggcgatggagtgtaacggtaacgggttatgctttaacttcgacgtcaaaagcccaatgtgcccttcgttcaagattactggtagccgcattcattcaccgaaaggccgcgctggtatggttcgtgaatggctgagactgctttcagaacagggcgtcgagccactggcgctggagcaggcactcccccaggagtcgatgagttttagaacgcttatcgagaaaacgcgcaacagttggtacgccagcaagggagagtatgatttctcccatgaggtcaaagatgccatgtctggctgtctggcctgtaaagcctgttcaacgcaatgtccgatcaaaatagacgtgccggggttccgttcacggttcctacagctttaccacacacgctatctgcgcccggtgagcgattacgtggtcgcgggcgttgagagctatgcgccgctgatgtcgcgtgcacctaaagtgttcaacttcttcttcaggcagccgtgggtgcgtgagctgagccgtaaaagcgtcggcatggtcgatttgcccttactctcctctccaacgttgcgggagcaactttccggacacagcgccgcgaccatgacgctggagcagctcgaaagcattccggtgacggagcgcgcgcagtacgtgctcatcgtgcaggacccgtttaccagttattacgacgcgaaggttgtcgccgattttgtgcgactggtggagaaacttaatctcaaaccggtgctactgccgttttctccgaacggcaaggctcagcacgtgaaaggattcctccagcgctttgctaaaacggccagaaagacctcgctgtttctcaaccgcgtatctcagctgggtatgccgatggtaggggtcgatccggcgctggtgctgtgctatcgcgatgaatataaagagatcctcggtgagtctcgcggctccttccaggtccagctggtacacgaatggctgataaccgtgctggctgaaaagccggagatgcagcagagcggcgagtcgtggtatctgtttggacactgtacggaaagcactgcgctgccgaccagcggcaagcagtggggcgatatttttgcccgcttcggtgcaaaactggaaagcgtcagtgtgggctgctgtggcatggcgggaacctatggccacgaggcgaagaacattcagaactcgctcggcatttatgaattgtcatggcatcagtcgctgcaacgcctgccgcgtcagcgttgtctggcgaccggctattcctgccgcagtcaggtaaaacgcatcgaaggcaacgggctgcgtcacccgcttcaggcattattagaaatcatttaatcctcaaggagagaacatcatcgtggcactttggaaacgcgaaactacgctcgaagagcttaataaaaccagtcagggatgcatggtcggacacatcggcatcgagtttaccctgctggcagatgaccgtctggaggccacgatgccggtagattcgcgcactacccagccttttaagctgcttcacggcggcgcatctgtggtgctggcggagtcattgggatcaatggcgggttatctatgtacccgtggcgatcagcaaattgtggggattgaagtgaacgccaaccatctgcgggcggcgcacagcggctacgtgaagggagtttgtcgtcctttgcacgtcggccgccgcaatcaggtgtgggaaatcaagatattcgatgaaagtgaaaacttgtgctgtatttcccgcctgaccaccgccgtaatcgaactttgatcggcttttaatgctagaataataaagcagggtgaaggaagtgacgccttcacccttattctttatagggttaatagttggaatttaatatttcacaataggttgaaatatacggtcagatattaaccctataaagagtgtgattattttcgggaattaaattcgccgcgattaaagctggaacggaacgcgcttaacaaagtcggtttggaaagctgtggctttttcccagatgcccatcatggcataatactggcaaatcattttgagagtgtgtctggcgaagtggtagcactgtacctgaaacaggttgctgcgctgaggattattaatttccgttatcaaccggttatgcaatttgcatagggcgtgaaggtagctttggtcatcgccattttgcaggcagagattcgccatatccaggcaaaggctgttgtagcccttgagctggtttatatctgcttccggcctggaaagcgccgcatcagccaaataaaagtcgaccgttgcgtctcggacgttaaatttatattcgtcgattttagcctgaagccacgcatttaccgattgagccatgagcgcattccgatttgaatgataactattatcatattaaaaaatatcatatttgcaaaaaagctgcggatcaatgttttctacgcccttttttgtccttgatcaatgtaggggcatgagacaaaaagagccttattcggcgatagggtagaagaaattcataaataggtatttccgatgaatgttttatcgtagtaaaacatctacagcaaagagagggcataaaagccaaaattgtcaatttttaacaaaaaattgacaatttattcaattagttgatgaggtgcgtagtttctatccagaaaaggcggcatctcattcacggacgcgagcagggctgtttgcggtccgtaatggctataccctcttaaaacaagaggttgaagtgacaagtgtaatcactaaaatagacactagaaggttgtctattaataacctgatattcatgaggtagacagatgcaaaccgaaaatgtcggcacgttctcattggatgacaacgtatggcaaggcgtgacgctgactgattccgcagccaagcaggtcaaaaatctaatgactcaggatcctgaagtcaaagggctacagctgtctgtgaagcagtcgggctgcgcaggttttgcctatgtgctagacctgactaaacaaccggcgagcgatgacctggttttcgagcgcgaaggtgctcacctgtatattccgttgaaagcaatgcctttcatcgatggaactgaggtggattttgtccgtgaagggctgaaccagatctttaagttcaataatccaaaagctcaacacgcctgcgggtgtggggaaagctttggcctgtaattctaatgtaatcgaagcgatgtaactaacatgtcacgaagcaacgtagaaattccagacaacgtgcagtcttgggtcggcgatgggaataaatacaaggaaggatttttcaccgcgctggcaaccgatgaactcgcatccggcatcaacgaagatgtcgttcgtgccatttccgccaagcgtaatgagccggagtggatgctggagttccgtctgcaggcttaccgtgcttggatcaaaatggaagagccgcactggcttaagggcgaatacaagcctttagactatcaggactacagctattactccgcgccatcgtgcggcagctgtgatgattcctgtggttctcagcctggtgccacgcagcagtcaaccgcagactcgctggctgtgcctgcgctcgaaaaaaactatctgaccaccgaagttgaaaaagccttcaatcagttgggtgttcctgtgcgtgaaggtaaagaagtggccgttgacgccatcttcgactccgtttccgtttcgaccacctaccgtgagaagctggctgaatccggcgttatcttctgctccttcggtgaagctattcacgattatccagagctggttaaacagtatctgggcaccgttgtgcctgctgaagacaacttcttcgctgcgctgaacgccgctgtcgcttctgacggtactttcgtgtacatcccgaaaggcgtgcgttgcccgatggagctgtcgacctatttccgcatcaacgcagcgaagacaggtcagttcgagcgtaccattctgattgccgacgaaggcagctatgtcagctacatcgaaggctgctcggcgccggttcgtgatacctatcagctgcacgcggccgtggttgaagtcatcatccacaaagacgctgaagtaaaatactccaccgtgcaaaactggttctccggcagcgaagagagcagcggtggtattttgaactttgtcaccaaacgcgctatctgcgaaggtgcaaactccaaaatgtcctggactcagtccgagaccggttctgccatcacctggaaatacccgagcgttatcctgaaaggcgataactcaatcggtgaattcttctcggttgcactgaccagcggcaagcagcaggccgataccggcaccaagatgattcacattggtaaaaacaccaagtcgaccatcattgccaaaggtatctctgccggaaagagtgaaaacagctatcgcggtctggttaaaatcctgccttccgccgagaacgcgcgtaactttacccagtgtgactcgatgctgattggcccagactgtggcgcacatacgttcccgtatatcgaagtgcgtaacagcactgctcagctggagcacgaagccacgacctcgaagattggtgaagatcagctgttctactgcctacagcgcgggatcagtgaagacgatgctatctcaatgatcgttaacggtttctgtaaagatgtcttttcagagttgccgctcgaatttgccgtggaagcgcaaaaacttctcgcaatcagccttgagcacagcgtcgggtaagtcttacccgacagacttgaagaacaacagaataagtagaaacacgagcgcacagacgcaaatcaaggatacacatgttaagcattaagaatttaaaggtccgagtagaagaaaaggaaattcttaaagggctcgatctcgagatcaagcctggggaagtgcacgccattatgggcccgaacggctcaggtaaaagtacgctttccgctacacttgcgggccgtgaagattacgaagtgactgaaggctctgtcgaattcaatggtaaagacctgctggagcttgatccagaagaccgcgccggcgaaggcgtattcatggcgtttcaatacccggttgaaatcccaggcgtcagcaacaactttttcctgcaaactgcggtaaacgcggttcgtaaataccgtgaacagcctccgatggaccgctttgatttcgccgattttatggacgaaaaaattgcgatgctgaagatgcctgaagacctgttgagtcgttcggttaacgttggcttctccggtggtgagaagaagcgtaacgatattctgcagatggcggcccttgagccaagcctgtgcattcttgatgaaaccgactccggtctggacatcgatgcgttgaaaatcgtttccagcggcgttaatgccctgcgtgacggtaagcgctcctttattattgtgacccactaccagcgtatcctcgactatatcaagcctgactacgtgcacgttctgtggcagggccgcattgtaaaatccggtgatttcagcttggttaaacagttagaggagcaaggttatggctggcttaccgacgaagagtaatgcccctgcagccggcagctcacatgctatgcagcagttttaccgcctgttcgaaagcgtaggtggcgagcagtcttcccatgcccacaaccattggcagcaggttctgcgccttggtttcccgcatgcgaagatggaagactggaaatacacgcctgtcgcgccgctgctgggtaaccagttctttgcccctgaaaaacagcaggtgtctgccgacgtgctgaaatccgtggcgctgccgctcgatacttaccgtctggtgttcatcgatggccgtttcagcgctgagcttagcgataccgacaccggcgatttcgagattgagaaactgaccccggcctgccagcaaacgctgccagaggcgattcagtcagaagtgttcctgcacctgaccgagagtctggcgcaggatggcctcaacattcgcctcgccgccggcaagcaggctgaaaagccgctttacctgctgcacatcagcagcggtcgtgccaattctcgcgaagtgaacacggcgcatcatcgctaccacgttgcggttgagcgcggtgctaatgccgaagtgattgaacactatgtgagcctgggcgaagcagggcatttcaccggtgcacgcctgacggcgaacattggcgataacgctgatttcacgcactacaagctctccttcgaaagccaggcaagctaccactttgcccataacgatctggtcgttggccgtgacgcgcgcgtttccagccacagcttcctgctggggcagggttaacccgtaacaacaccagcgcacagcttaacggcgaaggcagcaatctgaacatcaacagcctgctgttgccgattgatgccgagattgcggatactcgcacttatctcgagcacaacaaaggctattgcaacagcaatcagctgcacaaggtgattgttaacgatcgtgctaaagcggtatttaacggcatgatcgaagtggctaaaaacgccattaaaaccgacggcaagatgaccaacaacaacctgttgctgagtccgaaagccgaggtcgataccaagccgcagctggttatttttgccgatgacgtcaagtgtggacacggcgcgaccgttggccgcatggacgacgagcagctgttctaccttcgtgctcgcggtatcagcgggcttgatgcacgtaacatgattatctttgccttcgcagccgagctgactgaagcaattgaaaatgagacgctgcgtgaggttgttattgcacggattgcaggccgactgaatcgaggtgagtaatgagttttccactggaaagagtgcgtagtgattttcctctgctgagccgtgaagttaacggccagccactggcctacctggacagcgcggcgagcgcgcagaaaccgcgtcaggtcattgacagtgaaagtcagttctataagcacgactacgccgccgtgcaccgtgggatccacactctcagcgttgaagccaccgagcagatggaaaacgttcgtaagcaggccgccgcatttattaatgcggcttctgccgaagagattgttttcgtcaaaggttcgaccgaggctatcaacctggttgccaacacctttggccgcacccagctttccgccggtgatcgcattatcatcaccgagatggagcaccatgccaatatcgttccctggcagatgcttgccgaagaacgtggcctgcacatcgatgtctggcacctgacgccggaaggcgaactggacatgagtcagtttgcgtcactgctgacgccgcagaccaaactgctggcgctggcgcacgtctcaaacgtgttgggcacgcgcaatcccattgaaaccattattccacaggctaaggccgccggcctgtatgtgctggtggacggcgcgcaggctgtcatgcaccacaaggtggatgtgcaggcgttggattgtgatttctacgtgttctctggccataaactctatggaccgaccggtattggtattctttacggtaaagcggcactgctagataaaatgccaccctgggaaggcggcggctcgatgatcaagcacgtgagcctgaccgaaggaaccacctacgtcaaagcgccgtggcgttttgaggcgggctcgccaaacaccggcggcatgattggcctgggcgctgcattcgactacgttaatgaacttggtctggacgctatcaacgagtacgagcagtcgctgatgagctacgcgctcgaggcgatggccgatatcccggatatccatatctatggacctgcagaacgttctggtgtcattgcctttaacctcggcaagcatcatgcttatgacgtgggcagcttccttgaccaatacggtatcgctattcgcaccggtcaccactgcgccatgccgctgatgtcattcttcggcgttccggccatgtgccgtgcttctcttgcaatgtataatacccgcgaagaagttgaccgtttggtcgcaggactaaaacgtattagcctgctgctgggttaacaaaaagcaaaatagcaggatggttttttatggcaaatttgccagataagcaaaagttggttaaaaacttctcccggtgcccgaactgggaagagaaatacctgtatgtgatcgagcttggtgcgctgcttgcgccattaagcgacgaaaatcgtcaggcgcagaatctgatttctggctgtcaaagccaggtgtggattgtgatgcacgcaggcgaaaatggtcagattgatttcgctggcgacagcgatgcggccatcgtgaaagggttgctggcgattgttttcagcctgtatcacggcctgaccgcagaagaagtggtggcgcttgacgttcgtcctttctttggcgaactggagctgagtcagcatcttacgccttcccgttcccaggggcttgaggcaatgatccgcgctattcgtgccaaagcggcggtaatggcgtaaccacgccgcttttaccccgtgcaatggcccgacccattaggattgttctgctaatggggcgggccattttcgtttcccctccgatttttccctgatttatttctgatttttcagcagcttaattccttaatttccttgcggcgatctgatgcgtaacgcgttgattttagaagcctaaattgtcattaagaccagcaatgctaatattaactctaataacgaatgatcctcgagtaccttgatacttaggtcaataacctagatgagcaggaattagcatgaaactgactttgcctcttatgggaatgcttttcgccagcgtttttagcgccggaatgaccgcctcgaaggcggcggaatatccacttcccgccgataacagtcgcctaatcggcgagaacaccacttacgttgtgcccaatgatggcaaaccactcgaggccgtggccgctaaatatcaaattggcctgattgcgatgctggaagcgaatccgggcgtcgatcctttactgcctaagcctggtaccgtgctcaccatacccagtcagatgttgctgcctgacaccaaacgagagggcattgttatcaatctcgccgagctgcgtctctactattatccgaaaggggaaaacaaagtcgtggtctacccgataggcatcggccagctggggcgcaatacgcctgaaatggtgacctctatcagccagaagatcccgaatccaacctggaccccgacgcctaatattcgcaaaatctatctgaaggagcaggggattacgctgcctggcgtcgtgcctgctgggcctgataatccgatgggtctgtttgccatgcgtctggcggccggacaagggcactatcttatccacggcaccaatgccaactttggcattggtatgcgcgtgagctcgggctgtattcgtctgcgtcccgacgatatcgaggcattgttcaatagcgtacctaaaggaacgcgcgttcaggtcatcaatcagccggtgaaatttgacatcgagccggacagcaagcgctatgttgaagttcaccagccgctctcacggacggaaacggatgatccgcagacgatgccgatactcctcagcgctgcgctgaagaaattccgtgctagcgacgagactaataagcaggttttgaaagacgcaattgaacgccgttccggtatgcccgtactggtaaatacgggcaatgaggatatcaatacccctcccgcagcgggtgcgatgtaagtcttgacgggtttgatgccatttaaacgccaccaaaacgctttagtggcgtttttgtttgaaagtcttgaaagagtaagggggagggtgaggatggctctaaacgtgattgaagaggtttggcagaggaggagaggatgagaacgaaaacgaggcaaaaaaaatggcgcacaatgtgcgccatttcattatgagaagtaaatattacttcttgtaagcgtgagcttggttgtccagacgctggttagcacgtgctgcgtcgtctttagctgcttgaacgtcagacttaacagctgcaacgtcgttgctcagctgatcaactttagagttcagagttgaaacgtcagaagacagttggtcgattttagcattgcttgaacaaccagccagcagagtagaacccaggattactgcgcccagtaccagtttagtgcgattcattataaaaccctctagattaagttaatctccatgtagcgttacaagtattacacaaacctttttctaatgagaataaatttttatcgccaaatgctttattttgttcgttcgctcaaagaagcatctttttttacataaaagttgaaaaacgttatctaaaacaggcttattccatgagacttgtcccattttcagaacatcctatttgacagctttttctaaaaaacagagaaattggtcaaaaaaaacgccgcatttcgcggcgttgttattaatgtttaacctgcacgtcgttaaagcgtgtgcacggaagaggtgttggtggtgccacttggaactaaagcaccggaaaccatgaccactttgtcgcctttttgagctaaaccactttcgagtgcagcttctttaccaatgcgatagaaatcgtcggttgaagcaatttctttcaccagctgggtgattacgcctttggtcaggataagctgacgagcggtcacttcattggtggtcagcgccagaatcagggcgttagggaagtatttacgcactgaaatcgcagatttaccgccgtgggtggcgacaacaatcagaggcgcgtccagtttctcggccatttctacggcacctcggcatactgcttcggtgatacgcagtttgcggctgtcgttctggccgtcgatgcggctaggcatcacgcggtcggtacgctcacagatagtggccataatggtcactgcttcaagcggatatttacccttggcgctttcgcctgacagcattacggcatcggtgccgtcgatgatggcgtttgccacatcgcctgcttctgcacgggtagggcgtgggtttttaatcatcgagtcaagcatctgggtcgcagtaataacgactttacgtgcgcggttacacttctcgatcatcattttctgggcgaagataacttcttcaaccgggatctcgacgcccaggtcaccacgagcaaccatgatgccgtctgaggcttcgaggatttcgtcgaagttgttcaggccttcttggttttcgattttagagatgatctggatatgttcgccgccgtgcgctttcaagtgttcacggatttcaaccacgtcagaacgtttgcgaatgaaagaagccgcaacgaagtctacgccttgctcacaaccgaaaatcaggtcgcgtttgtctttttcagccagtgctggcagcgcgatggaaacgcccggcaggttaacgcctttgttttcgcccagatcaccgttgttcaacactttacaggtgacttcggtgtcgctgacgtgagtcacttccataccaatcaggccatcatcgaccagaaccgtgttgcccactttcaggtcagctgcgaagcctgcgtaggtgactgcaacgcgctcggtgttaccgacaacgctctggtcagtggtgaaggtaaaggtctggcctgcaatcagagaggcgtctttgccgccttccagtttgatggtacggatttcagggcctttggtgtccagcaggataccggctttcttgcccgttttttccatgacgctgcggatgttcttgatgcgctggccgtgctcttcataatcaccgtgagaaaagttcaaacgcatgacgttcattcctgcatcaagcagtttagtcagcatctcttcggattcagtcttaggtccgatagtacaaacaattttagtctttttcatgacgattttttctacaagttgtgatggataggataagagtgcgcagtgcggtagaacggtcgccgaacgcgctgaatgagttaatgacctggtttgagaaacacttcagtatgagcaaaacattactaagaataggcgagtgcgggagaaatgcagtgtaaagttcgacgggcacgcaactgtctggacgacatttgctcgtttcgagggtgaaaacgcttgttatatgacgatatcgatagatcaaggggctgaatccattcaatctaagaaactgtgccagtttttgttgccgatagtatagagggtaagagggagggaaaccaaacaaaaaatagcagggtgcgcaatacctaggtgttatctgcggctttgttgcgcaataacaacaaacgtttgcttaacgttgaggattacgcatgacgttttcagtaggtaaagcagattgggtgaaatgtcaggatttaatcagggaaataagggtaagcgttggattttatcgaaagatgcagggaggtgttcaggaatttgcattggtgcgtccgagtggactcgaaccaccgacccccaccatgtcaaggtggtgctctaaccaactgagctacggacgcacatcttaatgcaatttttacggctaaaccggttaaggttttgagatttggtgcgtccgagtggactcgaaccaccgaccccaccatgtcaaggtggtgctctaaccaactgagctacggacgcatcgtttatctctgtctgccagtgcggcagcggggacgaatattaacgacctaccggatggctggcaagggaaaaaatgcattttaatgacatattgcgtgcgattggtgcgctaacgctcattacgttgattttttaaacattaattacggtgcgctggcgataaacagcgcaccgtaagagggtaaaaactatcgccctgcgcgttgcagaatagaaaatgaagactgtttttggatccagcgcatgcgcagcgacatcatggtggcggcaaaagtgagtccgatgatgaatccgcaccaaaatccgctcggacccatggccggaaccagataattggtcagcgccagcaggtaacctataggcagacccaggatccagtaggcagtaaaggtgatgaagaaaattgagcgcgtatctttatagccacgcaatacgccgctgctaatcacctgaacggcatctgaaatctggaagatggccgcaaacaacatcagatgcgacgccaggctgacgactgccggattgtcgttgtacaggtgtgcaatgtgggagcggaagataaccaccatcgttgcaataatgcaggccataacaatgcccgtcgcgatgctggtcagtgccgagagcttggccgccgatggatttgattcaccgagacgtgacccaacgcgaatggtcgctgccacgccgagcgacaacggaaccacgaacatcagagacccgacatttaacgcaatttgatgacttgcgacggcaactattccgagaggggagaccagaagcgccaccactgcaaatagcgtaacctcgaagaacagcgccagcgcaatcggcagtccgagcagcgacagacgcttcagtacggcccagtcaggtttggcgaacgggcgcgttgcaacgatatctttcaggaagtaggagcgcttagtgtagatgcgcatcatgatgaacatgacccagtacaccgtgccggttgccacgccgcagcccacgccgcccagcgccggggcgccaaacttgccatagatgaagatatagttgaccggaatatttaccagtaggccgataaacccgaacaccatgcccggtttggtctttgacagcccttcacactggtcgcgcaacacctggaaaaacaggtaaccgggcgcgccccacataatggcacgcagatacccgatggccttttctttcagcaggggatcgatgttttgcatcatgccaatcatcaggtcgcagttataaatcaccaccatcaccaggatcgacacacccgcggccagccagaagccttgctgcacctgatcgccgattttttcacgacgaccagccccgttcagatgcgcgacggtgggtgttaaagataataaaaggccgtggccaaacagtatggcggggagccatattgatgtgccgacggcaaccgcagccatatcggttgcgctgaccgaacctgccatgatggtgtcaacgacacccattgcggtttgtgcaacttgagcgaggataacggggatcgcgagagccaataaactacgcgcttctgtgaggtacttctgcacgcatacaccttttttataatgatgagtaaaaccaaaaagtcacccgagggtgacgataatatagtgaggaattgccgaaagattgtaccttgtcaggttttttaatcaaatcgcatgcttaagtttcaacagatgccactctgctgagattttatccctcgagtatgggtgagatgtgcttttattcccgattttaattgggctttcgtgacgcgccatggcaaaaaaagtaatataagtggtaataaacgttgaattaacgaggcgcgcctaatgtttaccggaattgtgcaaggcaaaggcactgtagtgtctatcgatgaaaaacctaacttcagaacccacgtggtcagactgcccgaggcgatgctgccaaatctggcgcttggcgcatcggtggctcacaacggatgctgtctgacggtgaccaaggttgaaggggatttagtgagctttgacctgatcaaggaaacgctgcgtctgaccaacctcggcgagcttaaagaaggcgatgaggtcaatctggagcgtgcggccagctttaatgacgaaattggcggccatttgatgtctggccatattgtctgcactgccgaagtccagaaaatcctcacctctgaaaacaatcgccagatctggttccgtatgccgcatgcagaatatatgaaatacattctgcacaaaggctacatcggtattgacggcatcagtctgaccgtcggtgaagtcacgccaacccgtttttgcgtacatctgatccccgaaacgctcgagcgcaccacgctgggtgccaaacgcctgggtgacaaaattaatatcgaaatcgacccgcagacccaggccatcgtcgacaccgtcgaacgtgtgctggcaagtcgcgaagctgcacaggccgctgcggccgccctagctgaaatcgaacaccaggaacacgacaaagaataattgccctctttaagacgcaaaaagtaaaaaagccggaagcaattacttgccgccggcttttttattatgtgaagcatatcaacgtggaacgcgaatgccgccttcaacgccgttagggctgagaacaacctgccacagctgaatgtcgcgagcgcggaatgccccagcgcaagcgttcagataatagctgaacatacgatagaaacgcgttgaatagttctctgcaaaacttggccattcgtgaacgaaacgctcaaaccaggccatcaacgttctatcataatctgcgccaatgttgtgccagtcttccatcacaaacaggccttcagtggtctgtgcaatgtgtttaacggaaggcaggcagccgttcgggaagatatatttatcgatccagggatcgacattcagatcggttttattcgatccgatggtgtgcagcaagaaaagaccgtcaggtttgatgttgcgttttaccacgtcgaaataggtctggtaatttttaggcccgacgtgttcaaacatgccgacggaaacaatgcgatcgaactgatcgttgagatcgcggtaatcctgcagcaggatggtgacatcaagaccttcgcagcgttgctgggccattttttgctgttcagaagaaatagtcacgccgaaaacactgacgccgtaatttcgggctgcatattccgccaaacctccccaaccacagccaatatcaagcagtcgttgccccggctgaagctgcagtttctcacagatcattttcagtttggcttcttgtgcctgttcaagcgtggtcgcatctttccagtaggcacaggaatattgcatataagggtcaagcattttactgaacagatcgttacccaggtcgtaatgctctttacctacgatccaggcgcgttttctggactgcaggttggtcagccttgctgctgcgatacgcagtgtatctttaagatgatgtgggagtttgttctcgagccctgcggcaacgacgcgatggaagaacatgtctaatctttcacattcccaccagccatccatataactttcgccgagacccagtgaaccttcctgaagtacgcgcttaaaaaaatcgggattttttaccgtaatgtcaaaagggcgtgttccattaacctcaatgccagccattgataacatttcgctcgcgattcggtaccactgattatcttgaatactcaggtcttctacacacgatgaactcatagcttctccatcactttctcttctgacttattaacctgcttaaaaagcaacggctattggcaggtcttatgagaacagacggatattccgccttgtctgatatatgactatgaacagagggaaaatacgaaggacaccaggcgtaatacgccgcggtgaatcatccttgcactaataaatgtgacgcgattcgcgcgcacaaaagttacttgtgataaaagttttgtaaaagtgttattttcttatgttgaattgagtataagctcgcctgcgcgcattctcaactgtaaatcgcaacaggcgaacatattcttcaagttattgtaacataacggtattatattaactagttagcatgctttgcttctggatgtccagacttctgcttattcgctgaacgcgtcaaaataaagtatcccattcccaccagcaccaccgtcgtaagcataacggtcaccgtcgagaataatggctgggatataaatgccgacaccatcatgctacttaaaaagcaaagtcctaactgtaatgtattctgcaacgcggcagcctttcctgtattagcaggaaatggcattaatgcatttgctacgacaatgggataacaggcaccgtttaccagcgccattaaacagaacggcactaacaaacttaccagcgtagcctgagttaacgtcgcaaccagataaagcgatataacgctaatagcatagcctaataaaagccagggcagcagacgaaccccatcaattttattgataatcatcctacagccgtaaccccctaataaaaatgcaatagtttgaggaacatagctcaaaccaatcgcagaaggtccgtagcccatttcacttagaataaagggggaaccggtcagccaggcaaaaaagccggccgaactggcgctgtaaatcagtacgttaccgctataaaccggcgagctgagcatctcggtgacaccgctttttgcctgcgctttttcggcaacagactttttcgtttctttcagcgtcagcgtgaagaacagcagcagggcgcttatcaccagcagcagggcaaagatgactcgccagttgaaatgattcagtacccatgcgccgactaatggggcgagggcaggagaaagtgctaccaacggcatgatgctggcaaaggtgcgtttcgctacgtcagacgcatagcggtcaaccaccagcgcctgccagcttaccgccgcggcacaaaccccaatagcctgaacaaagcgcagcgccaggagcagctcggtgttttgcacccagatcatgcccagacagcctacggcgaacagcgacagtccggttaataaaataggtttacggccaaagcggtcggaaaggggaccccagaacagctgtgccacggcgaagccagccaggaagatactcaggctagcgcttattccgctggccgaggtatccagactctcctgcatgctgccaaaggccgggagatacatgtcggtcgccagaaatccgagcatgctcagcccggccagatagagtaaaaagccaaatgagggtttcatgatgttctcttataattcaaaaaagcagttaaatatttcgtagggtgaagccagtggcgcagtgtatccgcttggcttgcggattgtgaaacgttaatatttgcaccatgtgattaaaatatttgaaagcagagagttgcaatgatcatcccgacaaaaggcggtgcctatgtggtctgaatattcactcgaagtcgtcgacgctgtcgcgcgaaacggcagcttcactgccgcagcgcttgagctcaatcgcgttccgtcagcgattagctatcagattcgacagctcgaagaatggctggcggtcccctgtttgaacgccgacatcgcgacgtagaattgacgcccgcaggtcgccttttcgttgatgaagcccgagtgcttatcaaaaaaatgctatccacgcgtcgccagtgtcagcaggtcgccaacggctggagcgggcagctacgtgtggcggtcgaccgaatagtaaaacccgatcgcatacggcagctggtggtcgatttttatcgcgctttccccgacaccgagttattgattcaaggagaggtgttcaacggcgtttgggacgcgctggccgatgaccgtgcagacgtcgccatcggtgccaccagcgcggtgccggtcggcgggcgtttcagctttagggacatggggactttaccctggcactgtgtggtcagcgccacgcatccgctggcagcacaaaatagggcgttggacgatgatgcgctgaggccttatccggcgctgtgtatagaggatacctccagaaatttgcccaaacgcgacacctggacgctggacaaccagcgtcgtctggtcgtgccggactggacctgcgccattgattgcctttgtgaagggctctgcgttggcatgctgccggtacatagggtagcgccgtggattgcgcaacaaaggttggcagtgcttaatcttgccaacgtgtttccggaaagcccgtgttgtctgacgtgggaccagcgaaatcattccccggcgctagactggttgttggagtatctcggggacagtgaaacgctgaatcaagaatggctgagatagcctcacgcccccgaaggcaggcgtgagaggagcgcagaaaagcgagaattaacgacgatagtcgcggaaaggaccgtcggccacggagcggcgttcaaccagcttgggtttcacctcgatggtctgctgcacttcgcgcttgctaataatgcggtcgagcaacatggtaaaggccatctcgcccaggcgctctttcggctggtgtaccgtggtgagtgctggagagaagtagcgcgcgttgcgcacgttgtcataaccaatgaccgaaatatcctgaggaacgcgcaggcccatttcgtcggctgcgcaaatcgcgcccatcgccatcacgtcaccgccgcagaacactgccgtcggtcgctgcttctggttgaggatcttttgcattgcctgatagcctgattcaggttcgaaatcgccctgaaccacccattcatcacgcacggcaatattggcttcattcatcgctttcaggaaaccgcgatagcgaccgccgccggtgttgcggttcagctgaccgggaatggcgccaatgtcgcgatgcccgcgttcaaccaggtaacgacccgccagatatccgccctcgaaggcgttatcaataatcgagtcggtaaagtcgttctgcgcttcgccccagtccatcaccaccatcgggattgaacggtactcctcgagcatggcaagcagctcggccggatactcggcgcacatcaccagcaggccgtcgacgcgcttttgcgcaagcattgccagataggctttctgcttttccagattattgtgcgagttacacaggataagcgtgtagcccttcgcgaagcagctgttctcaacggcttcaatgacttcggcgaagtagggcgcctcactcgaggtggccagcaggccgatggacttggtgttattcaccttcaggctacgtgcgacggcgctcgggaatagtgcaaatctttaatggctgcgcgaaccgcagctttagtttcttcggcgacgaaacgggttttattgatgacgtgcgacaccgttgtagtcgaaacaccagcgcgcttagcgacatctttaatcgtggccatgtaaaaatcactcctgaactaacccttttcagcacgttagttttttgttaatcgtttgcctgcgtgcattcaactgcataaatcattttaagcagttaattcgttgggtggtttcaggaatcctgaaagatgcgtcggacaacgccgaccgggcacacagcgtggtaaccgctaattttctcttatatctcaagaaagggaaagccaaatttgcgctttcgcgataagttgcgcaaatcggtgcacgatcggtagacgtttttacgcaaagcgcgcaaaatatttaggcttataaaatatagggtttttaatcttctatccggcaaggagtctatgtggataccaatctgaaatactcattgataaccgtggtgtgcgcactggtgacgatcgtggcattcagctttaccgccgtcatgcactgatcttttgccgtcaggcagaaacgaaaaagggcgatttcttatcaaagaaatcgccctttactattttaccgcccgctggagaggggtaggcttaaaccattcgttaaatgctattcacaggtgttaagcgagaaatcattatttaacgaatcgttttcggcgtcatgacccggcgagcaccaacgtagtggtcttgccagtagttatctgccagataactaattttgatgtcttctccagagcgcggtgactgaataaacttaccgttgccgagataaacacctacgtggtccgccgcgccgcgtttagtaattctaaagaacactaaatcaccagactcaagctcaccgcgtggaaccggggccgcatcgcgcaaatggtacatctcattggcggtgcgaggcattttaatacgcattaaatctttgtacgcgtaataaaccaggccactacagtcgaaaccagtattcggggaggttccaccccagcgataaggtttgccgacctggtgcatcagcttgttcatcgcggtttctttagcatgcaaatactttttcttgtgcgctgcactcagcgttaacggggtgcaggtatcttcttttgttttatgctttcggtgtcgtccgtaggcttttttgccttctttcgcacagaccacgttagtggtagcagccagagaacggctaatcgagtttatctctttcttcgagttctctgccttgtgtcttgcgagcctggaagcggttggcttctcggccttgtgcctgacgagtttagtgctggtaggatgcttgtgctcgactttcgccttcccgtgcactttctctttcgtcctgctgtgttctttggctttcgattgttctttcaccggaacagtcttggtctttctattgcttctcgcgacgacctttcgctttcgtcgctcatcaggctttgcctggcttacgtgcgtttcggcctgtttggcggagacgcgatgacttggcgaagcattcgccaaattcaaaaagagctgggtaaacagcagcacaaaaagcgtaaacattaaacgcatggcgtcgctaccaatattaggccgaagttaaacatcaaaagatgtcccagtattcccgaaaagcgggagacaaaacagcacgaattgcttcgattctaattcatattgtgagtaaaagttaataactttttttctgggcaaaatatgagctatagcgccgaaaaaataaccaggattcagagggttaaactcacgttacctaaaagatccctttgggatcgtttgggttaaagtcacagaataaaaatgttattctatatgaatctttatttttgcactgttttgacaatcagggatactatcaccgacattacagggatgcatcaattaaaggcctttttgtgcgctaaagacctcacaaaaaatggcgtttttatccgagggctgctctcgttacaatggcagacagttgatcaggttttttccgatttaagtaatgaccgtgacagccaattaatggcttgaggaagcaagaaaatgaccactactattgaaaaaattcaacagcagatttccgagaacccgattcttctttatatgaaaggctctccaaagctgccaagctgcggtttctctgctcaggccgttcaggcgctgtctgcctgcggcgagcgtttcgcttacgtcgatatcctgcaaaacccggatatccgtgcagaaatgccaaaattcgccaactggccgaccttcccacagctgtgggttgacggtgagctggtcggcggctgcgatatcgttatcgaaatgtatcagcgtggcgaactgcagcagctgatcaaagaaacggctgagaaatataaatctcaggaagagcagccagaataatcggcttcgactcttgaaataaaaagggcggctatcgtagccgctctttttttatgtcttactatttatcttaacgagaagaatttatttctcttcaacgctctcttcttcagcaataggcaacggccagccaccgaggcgtttccagcggtttaccagctcgcaaaacaacgcagcggtttgctcggtgtcataaagcgccgagtgcgcctgagaactgtcgaaaacgatacccgcgctgatgcaggctttggccagcacagtttgtccaagcaccaggccgctcaacgctgccgtgtcgaaggtggcaaaagggtggaacggattacgtttcaggcccgcgcgctcggcggcggccatcaagaagctgtggtcgaaattggcattgtgcgcaacgataatcgcgcgattgcagtcctgctccttcatccccttacggattgccttgaaaatggcgtgtagcgcgtcgtattcgctaactgcgccacgcagagggttagtcgggtcgataccgttaaatgccagtgcctcaggatgcaaaatcgatccttcgaaaggctcaacgtgaaaatgcagcgtttcatcgttttgcagccagccgtcttcgtccattttcagcgtcacggcggcgatttcaagcagggcgtcggtctgggcattaaacccggcggtttctacatcaattaccacaggataaaacccgcggaaacgacctttcagggcgttaatgtcacttttgtcagccattggtatcttatctttaaacgaattcagcgcgcattatggcaaattttcaggccagatgcaggaggagagaataaaaagcaagaaagggcgcctcgattgcgccctttaagttaccggtgagacgggattagttacccagtccctgacctgcatgtttagattcgatgagctcgattttgtagccgtctggatcttcaacgaaggcgatgaccgtggtaccacctttaaccgggcctgcttcacgcaccactttgccgcctgctttgcgaatgtcttcacaggtttgcgcaacgtcgtcaacgcccagcgccagatggccgaatgcggtgccgtggtcgtagctctctacgccatagttataggtcagttcgatgaccgcccttcgctttcgtcttcataaccgacaaacgccaaatcgtatttgtattctttattctgactggtacgcagcactttcatgcccagtacttcagtataaaacttgattgagcgctgcatgtcgccaacgcggatcatggtgtgaagtaaacgcataatttcctctgattgccagttaaaacatattgaatactagactaactcaatgctatcgctttgtctttaagagacatcccgactgagcagtctctaagcactggcgggcttagagactgttttgaggcaacttacagcgtaggatagtcggtgtagccttgtgcgccgccgccgtagaaggtttctggcttcggctcgttgagcggagcatggtttttcagacgctcaaccagatccgggttggcgatatagctgcggccaaacgctacggcgtcgatgtagcccttcgcaataagctcttcggctttctcggcggtatatgcaccggcacccacgatgacacctttatagtgctcgcgaatcgctttgcggaacgactcggtataaggcttgccgccggcccagtcgggttccgagatatgcagatacgcaagaccacgcttgttcagctcatcgagcaggtagagcgctgctgactcctgatcttcgccgttgtccagaccgttgaatgggcccagcggcgagatgcgaatgcctacacggtcggcgccgatttcagcaacggcggcatcgaccacttccagcgttaggcgagcgcgattttcaatgctgccgccgtactggtcttcgcgtttgttagaagccggagagatgaactggtgcagcaaatagccgtgcgccgcgtgcagctcgatgtagtcgaaaccggcctcacgcgaattggctgctgcctggcggaagtcgttaacgatccccgggatttcagcggtttccagcgcacgcggcgtcgagcactcttcgcggacggcattgccgttttcgtcgcgcaggctagtacgggtcccggccgcaatggcggaaggcgcaaccggcggctgctgatttggctgtaggctggtgtgcgaaatacggcctacgtgccatagctggacggcaatgtgcccgtctttcgcgtgcacaccggcaacaatttttttccaggcggcggtttgttccggcgtgtgcagacccggtgcaccggcatagcctttcgcctggaaggagacctgcgtcgcttcggtgataatcaggccggagctatggcgctgggcgtagtattcgcccatcagcggggtagggatatccccggctcgatgctgcgcagacgggttaacggtgccataaatacgcgatttggcagggttttatgtccgactaccaggggcgtgaagagcttggtcatgtaactatctcctgaaacaataatgagatgggatgatgaatcattcttggctcacgttaatagaccagtcagtctaggtcaacctgaggctttgctccacagctcattttgctacgtcgagatgtcacctttgcagatttttggtataaaatatcagcatctttacctgttttctctccatccaccggttagcgcggagtaattttggctcagcagctcgagtttttcgacattcccagtccctgccgcggcgtgtgcgagtccgggcccaacggctactgtcgcggctgttttcgcagtcgtgaggagcgttttggctggatgagcatgaacgataccgaaaagcgccacgtattgcgcctgtgccaccagcgcttcctgcggctaaaacgcgctgccagggccgctgacgatccggctcccgaacagccctcactgttttaattcccctttcaaatcaatgaaaaattcataaaacaggctatgcttggccgaccataatgagaaaaggaatacacaatggaacaacgcacgcgtattgcgccgcaggggccggaattttcctcaatgatttgcggctattggcgtttgatggagtggggcatgacgccgcaacagctgctggcgtttatcgatcaacacgttgaacttggcataaccaccgtcgatcacgcggatatctacggcaattaccaatgcgaggccgcctttggtgaggcgctgaagctcaaccctcgctgcgtgacaagctgcagctggtgagcaaatgcgggatctcaaccaccgccgctccaggtaatccgatcggccattacattaccgataaagcctacgttattgcgcaggccgaacgttcgctgaaaaatttacatactgacagcctcgatctgctgctgattcatcgtccggacccgttgatgaacgcagacgaaaccgccgaggcgttcactgccctgcatcagagcggcaaggtgaagtattttggtgtctccaactttaccccggcgcagtttaccctgctgcaatcgcgcctgccgttttcgctggtgaccaatcaggtcgagatttcgccgattcatcagccggccatcctcgacggcacgctggatcaatgccagcaattgcggatcaagccgatggcctggtcttgtctgggaggcgggggtcttttcaatgatccacaatatcaaccgctgcgggatgaactgcagaaagtagcagaagagacaggcgcagagaccattgatcaagtggtctatgcctggatcatgcgtctgccgtcacgtccgttaccgatccttggcagcggcaagattgagcgtatcgcctcggcgtggaaggcattgtcgctggacattaaccgccagcagtggttccgcatacgcaaggctgcactgggatacgatgttccctgaggcaaaataaccggcctcaggccggtttaccggcaggctcagacgcgcctgccgccacgtcttctatattgatagccgactgcagctgcgacagcgaacagtaaagtcgccagatgacacccgccagttcgcgcgccgaggcatcggggtgcttcgacaacgcttcgctgatgcgctgcaactcgtttaggctggcatcaagcttcggatgactcacgccccgctcggtcataatccccttcagacagtgaatgcacacgtcacgcacctttgacagcggatttgaccgcgtttcccactctcgcagttgccaaacaatgtggctacagttgagcagcaccacgccccagcgcagcaaccaggtgcgcgagacctgatccttgctctgattaagctggttaacgcgatagtaaatcagcgactcgaactgcaagtgtgacatctgcggtctgcggctaagctggtcgataaaatcgcggcgcagggcgcgaatctggcggcgactcttgcggctgtccgagcttgggcgcaacacctggaagaaaagtccggccagcatcacgccggcaatctcggctaagccatcattaatgaacgactgatagtcaaagctcggtgggttcgccacggcgagcagcgatccactgaagacaatcagctgtccccacagaccggcatacgctttgtactgcaatttgcacagctgcatcgtcgccaataccggcaggatgaacgcgcaaaaaagccagaaatcggtgatttgcaccatcacgccgaacttgataatgaagcagccgataaacagcagcatcaacgacttagtcagcagattgatgctgttgatggggaagccgtcgaggagtagagcacacagccaatagcggccaacgtgacgcccgacgccccggagtcccattgggtgttaatccaatacgcgcaggccaccacgatgcacaaaaaagtgcgaaatccgctgtaagccgcctcatagacgtcggcgtggcgagtcagtttactcaccttggggcctgaatctgatccaccgagaccacattggcgttttcaacctgttgaagcagtcgttcgttgcgcaaatagagccagcaaaaatcgcgcagtcgttgccagaaagcgtgatgacgatagtcggcgggatcgacaggccggatatttttgagcgtcttggccagctgatatttgctggcattgggtttcctcagctcgtccagcagggcggcaagcacctcgttgaggttctcgggaggattcggccagttgagcatcatcctgcgcaggctggagatgtagctggttagccgcagctgctgatgcagcaggtagttgagcagattgttctgctgacgcaggcggtaatggctccagaaggcctggatacgcagcaggttgagggtcagtatctgattgattacccctcgtgggagacgcgaatctggttggtgacttcgctgcgccacagcaactgcgcgtgttccagcagctgaacgtgcatcttgcgcaacgaagtcagcagcgcatcgccgtcggaggtgctgggcatcaccatcatcatgaagcccccgcaaaggatcccggtaatgacttcacaaaccctggcctgcgcgatgtcaaagatagtgccggtatcggtcacgttgacggttgaaaaggcgataatcgcggcggtataaccggccaacgcaaaggcataggagacattgttctgatacagattggaggcataggtgcagacgcccagccaggcggcgataaacagcgtgaacagccaggggtcgttcaggcagtgtccggcaatgagcaccgccgccgatgcgccgagcagactaccgaagacgcggccgatacttttgcttatgacaccgccgacggtcgggaagctgaccaccgccgccgaggtaaaggcccagtaaggctcatcgagctgtagcacaaaggcaatccacagcgccagacacatggcgatagagtttcgcaacgcatagcgccactgtcctcgcgtggatcgaccccagagcgtgtttttccattccagccacgagaaattcaagcttttcccttaataatgaatcgatatcgtgcaggtagtcccggcaaccagcaccagattactcgggatattatcgattttgatcctcactggaacgcgttgagccagacgcacccacggtacgttcggcttaacgtcgagcaacaggccggtgtcgctttcgacgctctggtcgtaaatggcgcgcccgataccctcgacctcacccttgagcgggatattaccgttatacagcacaatatcggccggactgccgaccttgatgtgcttgagcttggtttcttcgaaatagcctaaaacatagaaggagtgcgcatcgaccagcgccaccagcggcgtaccggtagtggcatagttgcccttacgcgccaccaggttagtgatgtagccgtcggtcggagcaaaaatttttgttttgctcagattccagcgtgcctgctccagcatggctttcgtcgcttcaagtgtcgctttcattgatttggcttcgagatttgcctggtctaacgactcgctcgagatgacatcgcggcccagtttctgccggcgttcggcttcgtgattggctttatcgaggtctgcctgtgccttgtcaaccgaggcctgggcattatccaccgcaatctggaaaggcaccgggtcaaggttaaacagaagttctcctgcatggacatattgattgtcatgcacggtaatatcggtaaccctgcctgacacttctggcgtgatatcgacgagctcggcgcgaacttttccatcgcgagtccacggcgactgcatgtaatagttccacatccaccaacccgcgcataatgcgacggcgagcactgcaagcgttgaaaaatattttagtgtcttaaatttcatcttttttactcattaacgatcagtaatagcgccgcgcatatcgatatgacaaatatagataaatccatcaaagtgggatgccagatttcaccggaatagatccagttgcgcaacaatcggtgaataatcaaccaaattaacaatccaagtaaaaaagctttaaaaataggaggaaaatatagagaggcacccagcacaagatctgggagaaaagggccagaatggaacatttgcgcaatcacaatattaatctctgcatcgggttgtgttataaataacctggcttctgggtgcgttttgcattcggggcacgagtctcagattaattgtataaggtgttaccgttttagatttgtaattttacgattaaattcacgagaactaagctaaactctgggagttatcttagcatgctaattataaggagggtgcattggaatcaaaccttgggtcagatctcgcacgattagttcgtgtctggcgtgcgttaatcgacgatcggctgaagccattggagctgacgcaaacgcattgggttaccttgcataacatcaatatcttaccgcctgagcagtctcagattcaattggcaaaagctatcggtattgaacagccgtcgctggtgcgaaccttggatcagttggaagagaaaaggctgataacgcgtcaaacctgcgccagcgatcgccgtgcgaagcgcattaaactcacggaagaagcggcaccaatcattaatcagatggaaacggtgattgatgatacccgcaaagagatcctctcagggatgtcttctaccgatattaatttgctgttagaaatgttggcaagattagaaaaaaacattgcttccctacaaaacaaaccataacgacagcaagcattagaaccacatcgatggccatgcgtttaccgtgatttaatcttcgatttgtttttaagcaagaccgtagccaggaaaaaaatcggaacccctgcaggcagggattccgattttttttatgcccgtaacaaggtcacgagcgaggggagattaaacgcccggagaaacggtgatggtgctgccgctggtcgccatgctgacgcgctggccaacatagtatttggtgctgctgtcaactttctgcacgacctggatggtgttgccatcatctttacggatctgcagttcaacaccgtttgcacggttcaggccattagtgactgcgttacccgcaaccgcaccggccactgcaccaccggctgtcgccaggctgcgccctgcaccgcgaccaatggtgttacccaggaaaccacccaatacggctccaccgatagcgcctatcacgttgttttggtcatcaccctgaatctgcactgggcgaacagacaccaaggtaccgtaagaaatgttttgaacctgcttcgcctgtgaggatgagtagacattgcctgacagtgagtcgcttacgcaaccggcgagagtggaacccatcagagcgacgatgagaatacgcttaatcataaaaagctcctgtttatagtcacgtccccgcagttcagcgagtcgacgtttgaaatcgggacacagttcaacatcattgtagatagtgtcagctactatcataactcaaactggtgattatcttatagacgcgcttatcaactaataataaacgttggtttatttttgcgagattagcaaaaaaatacgcgaccaaaaccctttctttgtgacagcctgtttaattaacctttatccttcgggatttttgcgggagttcataagatgctaaccaagaagtcaggccgttacatcggcgttatgtcaggcaccagtctggatggagttgacgtcgtgttggcggcgatcgatgaacgcatggtggcccagcaggccagctactcgcatcctatcccgccggacattaaagaggcggtactcggcatgtgccagggacaggcggtgacgctttcacaggtcggcgaattggatgcccgtctgggacgtcttttcgccgaggcggtgctgggattgctcgacaaggcagggatcgacgccgaagaggtgaccgccatcggctgccacgggcaaaccgtgtggcatcagccgaaaggcgacacgccgttctccatgcagctgggtgacaataatcgcattgccgcgatgaccggcattaccaccatcggcgattttcgtcgtcgtgatatggcatggggcgggcagggcgcgccgctggtgcccgccttccatcaggcactgctcgcgcatcccaccgaacgccggatgatccttaatatcggcggtattgccaacctttcgctgttgctgcccggccagcctattcgcggctatgataccggtccgggcaatatgctgatggacgcctggatctggcagcagcgcgcgctgccctacgacaaagacgccgcgttcgcgagtgaagggcgagtggatttgatgttgttacagcacatgctctccgacgcctattttgccgaacctgcgccaaagagcaccggccgcgaatattttaatctggcgtggctcgagcgacagctggcgagtgcgcatccgctggcggcggaggacgtgcaggcgacgctggccgaactgacggccaccagtatttccgaacaggttcagctggcgggcggctgcgaccggctgctggtgtgtggcggcggggcgagaaatccgttggtgatggcgcgtctgtcggcgatgctgcccggcaccgaggttagccctactgacgcatttggcgtgagcggtgatgacatggaggcgttagcctttgcgtggctggcgtttcgcacgctttcgggacagccgggcaatctgccttctgtgactggtgcgagccgcgaaacggtgctcggtgcgatttatccggttttttccaacgttatacgtgaatagactagagtggttagcacgggcaaaaatcaggaaaatcaaaatgaaaaaagccattctcgtcggactaaccagcgttgtactggccggttgcagtcagtttagccatcaaccggcctccgacgccgctcccgacagcgttcaactgcattatgaatgcggcacgacgccgcttagcgtaacgcttaacaaaccggcacggcaggtcagtttaattctcgacgggattcagctgcatctgccgcaggtagaagcggcgtccggtacgcgctacagcgacggtcactacacgttctggtccaaaggtaacgcagcattagtccagcgcggcgatgacgtgatcatcgacgattgtgtcatcgttcctgcgaactaggcgcgacagcgtgcctgttcccccggccacttacctgagtcagcgtccggaaatgctttcacttgccgcgttgctgtaatcccgattacttgggatagagcattgttatcttttaaagtgtggcgcaaaataaacccatcccactactgactagatgttgaacctatatggctgaaaataatgagtttgacgttgccgatctgcgacgtgaatatacccgaggtggtttgcgccgcaaagatttgacggcagagccgatggcgctgttcgagcactggttaagacaggcctgcgaggcaaaactcccggatccgaccgcaatgtgcgtcgctaccgtggacgaaaatggtcagcctttccaacgtatcgtcttgctcaaacactacgatgagcatggcatggtgttcttcactaacctgggcagccgcaaggcacagcagctggcgctgaatccgcgtatcagcctgctttttccgtggcacatgcttgaccgtcaggtcatcgtgctggggcaggccgaacgtttaccgacgctggaggtgatgaaatacttcaccagccgtccgaaagacagccagatcggggcctgggtctcccagcaatcgacgcgtatctctgcccgcggcgtgctggaaagcaagttcctcgagctgaagcagaaattcagcaatggcgaagtcccgttgccaagcttctggggcggattccgcgtgaaattcgattcgatggagttctggcagggcggcgaacatcgcctgcatgaccgcttcatttatcagcgcgagacggcatctgaaggcaatgcgccgggaactggttggaaaatagaccgactcgcgccttaagccgctaaaagttgtctgaaaacctagcgctcgtccctcgggcgctttattctataccccttacaaactccctgtgccttaacggtcagtctttgtaatcccagatttcgcaaacgcgtggacgagggtgtcggcgcgtttttttgcatgaataatcccgataaacaattttccagaattgatggagtttttgatggcaagcagcaacttgattcaacaattgcaggagcgggggcttatcgcccaggttacggacgaaaatgcgttagcagagcgactggcgcaagggccaattgcactgtattgcggtttcgatcctaccgccgatagcctgcacttgggccatctggtgcctttgctgtgcctgaaacgcttccagttggacggccacaagcctgttgctctggtcggtggcgcaaccggcctcatcggtgacccgagcttcaaggcgaccgaacgtaagctgaataccaacgaaaccgtaaacgaatgggttgaaaaaatccgtcatcaggtttccccgttccttgacttcaactgcggtgagaacagtgcggtcactgccaataactacgattggttcggcggcatgaacgtgctgaccttcctgcgtgacatcggcaagcacttctcagttaaccagatgattaacaaggaagcggttaagcagcgtctgaatcgtgacgacagcggtatctcctttaccgaattttcttacaacctgctacagggttacgatttctcttctctgtacgacctgcacaaggttgagctacagattggggttctgaccagtggggtaacatcacctcgggtatcgacctgacgcgtcgtctgcaccagaagcaggtgtttggtctgaccgttccattgatcaccaaatcagacgggaccaagttcggtaaaaccgaaggcggcgccgtgtggctggatccgaagaaaaccagcccttacaaattctaccagttctggatcaataccgcggatgccgacgtttatcgtttcctgaaattcttcaccttcatgagcattgaagaaattaatgcgctggaagaagaagacaaaaatagcggtaccgcaccgcgtgcacagtacgtgcttgccgagcaggttaccggtatggttcacggcgaagaaggcctggccgcagcgcgtcgcatcactgccagcctgttctccggcgcattaagcgacatgagcgaagccgacttcgcccagctggcgcaagacggtatgccaagcatcgagctggaaggtgatgttgatttgcagcaggcgctggttaacgccgagctggaaccttcacggggccgcgcacgtaccgctatttcgtctaatgcggtgatggtcaacggcgagaagcaggccgatcctgaatacaaattcagcgacagcgaccgcctctttggccgttatacgctgctgcgtcgcggcaagaagaactactgcctggcagtctggaaataaaccgaaccgccgacgggacgctccaggcctgccgtcggcaatctcattgacccgttgcgccatctcgctgatgacgttggcatcggactctcatgaaaaatattctctcgattcaatcccataccgttttcggtcacgcaggcaacagcgcggcagaatttcctatgcgtcgtatgggcgcaaacgtttggccgctgaataccgtccagttttcaaatcatacccaatatggccactggaccggctgcgtgatgcccgccagccatcttaccgatatcgcacgcggtattgccgagattgaccgtcttaaggactgtgacgccgtgctgagtggctacattggttcggcggagcagggcgagcatatcctgcaaatcgttaagcaggtcaaagcggcgaatccagaagcctggtacttctgcgatccggtgatggggcatcctgagaaggggtgcatcgttgcaccgggcgtggctgagttccactgcaaacaggcgctggttaactgcgatattatcgcaccaaacctgctggagctggaaatgctgagcgggagcacggtcaataacgtcgaagacgcggtgagagcggcgcgtgagcttattgccaaaggacccaaagtggtgcttatcaaacaccttagccgtgccggttatcagagcgatcgtttcgaaatgctgctggtgaccgcagaggcggcgtggcatatccaccgtccgctggtggatttcggcgcgcgtcaaccggtgggcgtaggcgatttgaccagcggattactgctggtggacttgcttaaaggccaacagcttgaccaggcgctagagcacgtgacggcggccgtttacgaggttatgctggccactcattcaatgggtgaatacgagctacaggtcgtggcagcgcaggacaagattgtgcatccgacccaccatttccctgccgttaagctttgatattattaggttccccggctcaggggaaccgatttctattatttcagtccctcggccaccagcgccgcatccaccgccggcctggccgcgactcgctcaatgtagctgttcaaatcgggcagtgaagagaggtcaaacttcagcgccttggcccatctcatcatggtaaacagatacgcatccgccacgctaaaacggttgcctagcaggaactgtttgtccttcaatgaagtattcaggtaggccagctttttatgcagcgcctcgcgggtcatgaatttgtattcgtcgggggttttgggattaaacagcgggctaatactgcggtgaatttcggtcgcaatatagttcaaccattccagcgcatgatagcgggccagagagccaaattccggcaaaagctgtcggtcgggcttctggtcagcaatgtattgcaccaccacagcaccttcggtgagcaccgttccgtcatccaggaccagcgttggcacctggcctttgggattgatgtgatagaaatcttcgccctgctcggtcttttttgtcactaaatcgactttaacgatagtgaaatcaagaccggcttcacgcaggacaatgtgtggagaaagtgaacaggcacccgctttataataaagtttcatacaaaccccgagttatcagatggtatgccaggaactatatcgtcgtctggttgcagctgttcacattataatctatctgctgaatgtattgagataattgacgatagcttcttcaacttctgcggggcaggcaacattggcgcacgcagttcgttttgcatcaggccacccaatgagagcgcaaacttgatagatgccgggtttggcgcggcaaacatcaggcgaataagtggcatcagctggaagaagttctcgcgtgcggcggcaaggtcacaggcctgaacctgtttgacaagcgccacgaatttctctgggaacaggtgagacgaagcggcgatagcgccgtttccgcccatgcacagggtggccagaatctgcccgtcttcgccacacagcacgtccaactcgccgtcggcaatcagggaataggtcaaatcggtgctgccgccgcagtctttcactgccacgatgcgtggatgcttggccagacgacgcagggtttccagctcgagatgaataccgctgcgataaggtacgttgtacaccacgattggcacgcttgagctgtcggcaagctgagtgaagaacgcctccagagcagcctgagaagggcggatatagtaaggtgcaggcagcaaaataccggcaattggacgctcggtaatggctttctgcattgccacaatgctgggcatgtgggtgccagaaaggcccatcatcactttattacccggcacgacggtcagcacggcgtcgaggacttgcagctgttcttctttgctgagcatcggcgcttcgccggtggtgccacacaccacaacgccgtcaacgcctctgtccataacgtgctggcacagtgcggtcagcgcgagaaaatcaatttcaccctgattgaaaggcgtaaccagtggaacccaaatacctgaaaatattgacataatttatacgcctgacgcagaggtcatccaaaaaattgtaggaaaggctttcacaaaccaaataaaaacgtgctgcttttcagcttacaaacagtctgcggtaaaaaggcggcgtcggctaatggaatgatttaataaggccgccagcattatttatctggctaatggcatatgccgaagcacagatcagggtttgggagaggtattggagtatttttcacggaattcacggcgataggcccgggatttccgtcgtccttttaaccacaggaaggtacagaccagacatactccgcccgagaacaccagatttcgcatatcgcggtcgtagaagtaaaccagcacgcagtcgagcgcggcgacgatggcgaaccatttatgcacgtgtgagagcttgcgggtctcggcgttgagccgcttcagttggcgtccttcatccaggactttacgtttttccatggaggcattcctggtgaactcaagattgaatcaaatataacaaaacgaataagcaaatactgggccgcatttaaaaatatcagcattttttgttaaaaatgtgcggtctcttacatcaagaaccgccggggaaaggcagcgataaaaaaggggggaacgtcgccgttccccccttttctatctctgagttatcagactaattcgataacgtcgaagttcgcttcagcgctgacgtcggcatcgtaatcaacgccttttagaccgaaaccgaacagacgcaggaattcgtctttgtaaccttgatagtcggtcagctcatagatgttgtcatcagtcagctgagaccagataacgccgcaggtcttctgcacttcgtcgcgcagttcccagtcgtccagacgcagacgatttttgtcgtcggtgtcaggcacggagttattgtacagtttggtcgcgaacagacgttggatctgctcgatagtgccttcgtggatgccttgctctttcatgattttgaaagagatagcaatatacagaggcattactggaatagcggcagaagcctgggtcaccacggatttcagcaccgcaacgttcgcagaacccctttggatttcagtcgggtgtcgattgcctgagctgcacgatcgaggtcttctttcgctttgcccagcgtaccgtgccagtaaattggccaggtcagctcggtgccgatgtaagagtaggccacagacttggcaccgtcggccaatacgcctgcgtcttccagcgcgttcatccacagttcccagtcctgaccgcccatcaccttgatggtatcggcaatttcctgctcgtttgcaggttcaacaacggcggtcaccagcttgtctttgttggtgtccagcgcggttgattcgtacggctcgccgataggtttcagcgcagaacgcaccagttcgcctgaatcaggtaatttacgcactggagaggccagtgagtaaaccaccaggtcgatttgacccaggtcttctttgataagtttaatgacggtatcgcggcattcgttggagaatgcatcaccgttgatgcttttagaatacaagccttcttctttagcggctttatcgaaagcggcagagttgtaccagccggctgaacccgttttgctttcgctgcccggtttttcgaagaacaccccaatggtggcagcatctgcaccaaacgcggcgttaattcttgaggcaagcccataaccagtggaggcaccaatgaccaggacgcgttttggtccgtctttcagtttgccctgcgctttcacgtatgcaatttgctcacgcacgttggcctcacagccgattgggtgagtggtcgtacagataaatccacgaattttaggtttgataatcatgacaaggcttatcttgttagttattgatggacggtaatattaccttattttctcgacaagcttaacactctgcttttgtctcagagtaaattgtcggaatttaattatagctaaggctgtgaaatgagaaacaaaaggacaaggattaatcgcttttgccaccggtgcggcgggggatgccgcaccggcgttctccccctgatgacgcataaatcgtctaatgggagagttgaaaagcagattacgtcgagaaattatgcgcgagaggtggaaactcccgcctgtggctgatgtttctcatcggagtcgcgatccagtgtcatgcggtgcagttttgatgcagtcaccagcatcagcagtgcaatcacgccggtcaccaggccgatttgcataaacacgtggctatagatagccagagacgcatgtgcatcggtgatgtcgcctggaacggcggtcagcgccgccactttaccggcaatgattgccgccgctgcggtggtcagataccaggagcccatgatgaagcccatcagacgctgagggaccaactgtgcgaccattgccagacctagaccagaaatcatcagctcgccgatactctgcagcgcgtagctcagcaccagccagttaacggaaacgatacccgcatcgctggcgaaggttgcgccccaaggcagcaccaggaacgccagtgaacacagcaccatcccaatagcaaatttgtgcggcataggcatacggtcacccagcttggcataaagagtcgccagaatcgggctcgctaccatgatccagaatgggttcagcgcctgatactgctccggctggaagtcgatacccagcagatggttgttcacgttatggatggcgaagaagttcagcgaggttggcatctgcgcatacagcacgaagaacacgatagcctgcagcatcagaatgaaggcgaccatcatcttgcgacgggcgatgcccttcagtgcgaaggtctctttaccgaagatgcaaacgatgccaatagccactactagcagtgcccaacgcgcgatgctctgattatgcagcaggaagcttgaaacggcgatcagcgcaaccacgcctaccacaaccatcagcagtttacccaggtgcatcggctggaagtcaggcttggagccgtggtttttcacccaatgacggcagaacatgaagttcaccagggtgataagcatcccgaccacgctcagagagaacgcgacgctccagccgtacttcgcggctaaccatggcgttgccagcatggagaagaatgaaccgatattgactgacatgtagtacatggtgaacgcgccatcgagacgcgggtcatctttggcatagcaagtagacagcaaagaggatggatttgctttaaacaagccactgccgacggcgatagtcgccatacccatgtaaacccagaaaatatcgtgaccggagtaggcaacctgagcatagcccagtgccagcaccaaggcgccgagaacgatgacgcgtttggacccgagcactttgtcgcccagccagccgccgatggcaacgaagccatagaccagtgcactgaaagacgagaacagggtgatagaagctgattcactcaggccaagcatcttgaccaggtaaaccgccataattccctgcaggccgtagtaaccaaatctttcccataattcgatggagaaaataaggtagaacgagcgaggctgtttgaaggcgttcatgctgacgctttcttgggttggtgttgagtttgttttagacactaatacctctttttatctcttcctgtttctaggacaggcattacaaatgtcgtgcgggcaagcacgctttgcatagttataggatgtgtgacggcgggtaatgttcactatctttcgtattcaggcaagctttttgtcatatcctgttacagttatacttcgccccctgattaaactctgttcgaattgttacgcaggattaaagtttatgtttaataaaattgttgaatttatatcctgactaataatcaatcatttataacgagggtttaaaagctggatcacagtgtaatatcagatttatgaaggcactttatcggattaaactgagagtaaactctgtttttagaatattttgcaggattttataaataagtaaactctgtgattttgcaagcgttttttgggtgacgattgtaatgtgatattcgtcactttttaacactaaattttagataggaattaagccaagtatcagttgaggaggtagggagtgagagggatgactagaaaacggtcattgcagagagagatcccctgcaataaccacgataacagttggcttaggctggacgagattcgcccagtgtctggatgagtctattcaaccagttaaacagcgcgctgctcaataaaacgtctaaaatttgcgggtagctataccccgcattgaccagtggctggatggctgaggcatcaaatttttccggtgcctgggttaaggttttaacggatttaaccagcgggtcaatcgacgactgagccacatttttcgcctcattgtcctggaacaggctgtcgatatgcgcggtctctccgccgcagtcgagataatagcggccgtggataccggcacagaacaggcagccgttaatgcgcgaagtggcagcggcagcccactctttaagcgccgatttttcatcgccatgctgctgcataatgtgcgttgtcaccgcagacagcgcgtcaagggtggcggaatcctgcaacagcaggcgataaaacgaggattcacgtgcgtcggggcgcagaagtcgagcacatccagctgttctttgctggctttatgcagatcgacctccggcaaaaatgcgtgccagctgcgcagctgcagggagaacccgcgctggtcgttatcttctggccgtgggaaaccaggcaataccgttgccggacggcctgccagcgcattaaccaccgccagcagtcgagcctgaaaactcacgaagccaatcagctgtgagaacagcacaatatcctgcggactcagacccacgtcggcgagctgcttaagcatcgcagaattaatcagcgtcggttgagtggcgagcagtctggcgtattgggcgagatgagtctgacgaatgttgctttcacgagaggcgtcgggacagttgagcggggcaaggcgtgcggcataatggctacagagcggctgaatgccggtaacctgcgccacggtcaatgcgctgctgagtctgtcgtacagtgagagcgtctgaaagcgtgagagtgagacacttttaggaaacagcttgttgtaacaggtttgagccgcaaacaataaaccgttgcgctgagtcagcaagcggcgcagtgagggctctatcttttgttcaagacctaagagaatgctgtcaggttcagtttgacagggatccaatggtgtatgccgctgctggctggattgggtttcgtgataccaaccatcgatagcggcccggcgctgttgttccatgatcgagtcctttgcgagggcaatttcagactctatccttgccgatcgttcacgccatataaaatactgttaagtgataaatcatagctaaaaggaatagtaaaataaaaaaaggcagataaaaccgactatgcctcgtcggttctagctcgcctttgtttcaactacgctttaccgtcccgacgcgatgcatccgcgttgagcgactcaccaaagtggctggccaccagtctgcgggtgaggtcatgctgcggcgaggccaatacttcctcagtaatcccccgttccaccacttcgccattgtgcatcaccagcacctgatcgctaatatgtttcatcatgccaagatgttgtgtgacataaatgtatgaaatttcgtgcttttcctgcaattccagcatcatgttgatgatttgcgaacgcatcgacatgtccagcgacgccagcgcttcgtcggcaacgatgaccttgggttgcagaatcagtgcacgcgccaacgccacgcgctgcacctgcccggaggccagcatatgcggataataattggcgtggtccggcagcaaaccgacctgacgcagcgtttggttaatgcgcacttcacgatcgtgcgcttccatactgctcgtcaggcgcagcggcgcttcaagaatttgtccgatccgctgacgtgggttcaacgacgtcgtcggatcctgaaaaatcatgcggatagtctgactgcgctggcgataatcaccaaacttcaggctcttgtcttcaaccaggatctcaccgtcggtcggctcaatcatgcccgccagcatttttgccagcgtggatttaccggagccgttttcaccgatgatcgccagcgtttgttttgcacgcagcgtgaagtttaccggcttgaccgcctgcaaattcatcttgcgaaacagtcccgtacgatagcggaaagttttgcacaggtttctgacctcgagcagtgtctcagccattattgctcctccatattgagcgggaagtggcaggcataggcgtgagtcttggccaggcgcaggcgcggcgtctcaatgcatttcttctgtgcgtaagggcagcgtggccctaggcggcaaccgatgggaagatgctcaagcgagggaatagcgccgggcagcgtgttaaggcggctcttgtgcggcagagagtggccaaagtccggcatcgcgcggataagcgcctgggtataagggtgatgcggcgccgcgagcaagtcctcgcacatcgcgctttccaccgtttgcccgcagtaaagcacgttaacccggttggcccacttgctcatcatctgcaagtcatggctgatcagcagaatggtggtgttgttgttctggttgagtcgcgccagtagacggaaaatctgtgcctgcgtggtcggctccatcgcgttggttggctcatcggcaatcagcagtcgcggctggttggcaagcgcgatagcaatcatcaccttctggcattcaccctcggtgagctcgtaggggaagctggccatgatgtctttatggtccttgatccccacgcggtgcagcagttcgatagcgcgacgtttacgccacataaaacgctgataccaaagacctttataggtccagcccggaatagcctgaatcaactgacgaccgatactctcggaagggtcaaggcacgactgtggctcctggaaaatcatcgagatgttatgaccaatcagcttgcggcgttcacgcgggctgagctggagcaggtcgatgtcgtcgaagcgcatacggtcggcggtaacgcgccagttgtctttggttacgccacaaattgccttggcaatcaggcttttgcctgagccagattcccaaccagtccgcgaacctctcccgcggtcagcgtgatgctgacgcgatcgacggccttcaccgggccgtccgaggtcatgaattcgatagtcagattgcgaatatccagtaacggcattatttcacccctgcaataatcgcgcgacgcacgccatcgcccaacagattgattaataacacgctaatcaggattgccgcaccgggcagcatcacggtccagggcgcgacgtaaaccagctccagcgagtcccccagcatggcaccccattccggagacggaagctgtgcgccgaggtcgaggaagccgagcgcggcaatgtccataatcgccatcgacacggaacgggtgaactcggtcaccagcacggcgacgatgtttggcagtaccgcatagcgcagaatttgcagcgtggttgcgccgtcgagacgcaccgcgaccacatactctttctccatctcgtcatgcacggcaacgtaaagcgtgcgcgccatgcgcggcagcagcgcgagccagacggcaagataggcgtgttcgagcttaggcccgataaacgcaaccaccacaatggccagcagcagagaagggatagacagcagcgtatcgagaatgtggttcagcaccgccgagcggataccgcgggtaatccccgccaatacgccaatgatgatggcacacacggacgcggccagcgtgaccaggaaggcaccgccaatcgttggcgctgcaccgctcagaatgcggctcagcaggtctcgccctaaatcgtcggtcccgagaaagaacgaaacatcaccatagcgtgaccacgaaggcggcagcagttgataccccagaaactgctgatcgagctggtaaggtgcgagcaggctgccaaaaatacacaggaatagcagcccaatcacgccgtaaaagccaatcatcgacaggctgtcacgataaaaaatacgccaggtgtagcgcagggtgctgggcgcctgtttttcacggtatacgttatctaaaggcataccattccttatgtttcaatgggttcagcatcgcgcctagaatgtcggaaagtacgttgaccagaatgaccaaggttcccgccaccatgacaccggctgaaatcgccgcgtagtcctgctggcgaatcgcgttaaccagccagcggcccagtcccggccagttaaagaccacctcggttatcatcgccagcgtcagcatggttgagaattgcaggccgagctgcgggataattggcggcagtgcgttgtgcagaacgtggcggcgaataatggtaaagcgagacaggccacgcgttgccgccgccttaatgtagtttttcgacagcacgtcgtcggtgctgatgcgcatcaggcgaataacctccgtggtcggcgcgaccgccagtgcagcaatgggcaggatcatgtgcttaatcgcactgacaatcatctcatggcggtagggcgagtgagacagccaggcgtcaatcagcgcaaagccggtgaccgttttgagctgatacagcaggtcgatacggcctgaaaccggcagccagccgagctggagcgaaaagaacagcatcaacagcagcgcgagccagaagataggaatcgagaagccgagcagggcgagagtgctgatagccacgtccggccattttcctcgcatgacacccgcagtaatgccgagaggaatgcctaccagcagggcgaggaaaaacgccagaacgcacagttccatggtggccgggaacacgctaagtaactgctcgccaatcggctcaccgttgatgctcgacacgccaaaatcaaattggcaaacgccaataaagaagaaacggtaggcatcccacagtgaagcgccctgtaaaggggcatggggcgtgaaatagctcaggctaaacgccaccaggctgagcagaaacagcgtaatcaccagcagcagcatgcggcgtaaaataaagataatcacggtttcttctccaccactacaggaccttcgtcgctggcatcattgttgataccgttcgaatctcgataaacgccagcgaaggaggagttgccaaacggactgagcaccaaccctttaatatcatatcgataggcctgcaaacgcagtgaggaagccagcggcaacaccggcagctgtttctcaagaatggcctgcgcctgctgataatagtcgatgcgctgggacagctgctgcgagagcaatgcctgatgaagcagcgcgtcaaattcggggctgcaccagtgagcatagttggtctgcgagcgaattgccgcgcagctcagcacaggacggaagaagctgtcggggtcattactgtcggtggaccagccggacagcgtcaggtcatgattcatctccatcagccgcgcttcctgaaaacgcccctcgaccggcacgataatcactttaatgcccacctgcgccaggtcggcctggataagctcggcggttttgagcgggctaggattataggactgcgaaataatcggcacccacagatgcaacacgagatcttttttgccgaggctgtcgaggatttgtcgcgccttggccggattatattcagtgactttggcgttgctgtcgtaggcccaggaggcccgcggtaacaccgacgctgcggtctctgcggtgccgtaataaatcgactgcatcaggcgctgattgttgatagccagcgcgatagcttcgcgcacgcgcgcatcgtccagcggcggcttaccggtgttaaacgccagataagccacattcatgccggggcgcagcgtcaggcgcaggcgcgggtcatcgcgcagaatagacagctgactggcggccggataggccaacacgtcgcattcgccggtgagcagcttggacaaacgtcccgtgccgccgacgcccatatcgataaccacctgctgcatacgcggcacgcccttccagtatttgccgttacgggcgaggcgcacgtactggcccgcgcggaagccggaaagctggaaggggccggtaccgaccggctggcgatcgatttgctcttcattgccacttttttgcagtttgtcggcgtattcagccgacagcactggcgcatagtgcgtggcgagatgccacaggaaggaggcatccgggttattcaatttaaattcaacggtatagtcgtcgattttacgcacgctcttgaccgtcttggcaaactgcaaactgtcaaaataggggtaatcgctgccgttaacgttgtggtagtgattattgtcgtcaatcacccgctcaatgctgaacaccacgtcatcggcgttcatcatgcgcgtcggggtaaaccagggcgtggtctggaaaggcacgtctttacgcaaatggaaacggtaggtcgcgccgttatcaagcacttcccagctttgcgcaagctgtgggatcaggcgataggtgtacgggtcgacgtccagcagacggtcatagagctgcgcggccagggtgtcgataatgaccccgctgctggctttctgcggattaaaggtgttcaccatgccgttgacacagtagacgaatccgctttgacggacatcgtgggtcgccatcgacgacggggctggatgcgtttttacgctatcatgattggcagcaggcgttgctgccgccagcgtaacggcagcaaaacatgccgaagacaaaccggcaagggaccgcatccaaagggttaaacgacgcataagggcttcaaatgtaagtaagcaatctgctaagtgtaccgcactctgccagacaccccaatcattgcgcaaacattcgcaccaagagtagccgcagattctgtatggtaatgagaaaaattctcaacaaacccctttacagagtgtactgataactattatcatcttctcatcgactgggacacgacccgcccgggacgttattcagttgatacgacattgctcacattgcttccagtatgacttagccagctcgggtgctggcttttttttgcctgcaatttaatgctttacctcagttttcttcctgtgcattgacctgcatcccgtgttttttcaacattcctctgagctggtgataggtcaggcctagcaaatccgctgcacgccgctggttgaattttgcctgtcgaagcgcctgctcaatcaagttcgcctccaccgtatttagccagcttttactgtctaccggcagcgtaggcagggcgaaaggggcgtcctcgtcctgcgcacgtggagcctgcttttctttttgttggctaaaaggattgataacgatgttgtccagctgcgtatcactgttgccatggcgatacatcgagcgttcaaccacgtttttaagctcccgcacgttgcccggccagcggtaatcgagcagcgtatctttggcttcttcggtaaacccagggaacagcggcagcgaaagttcgcggcacatctgaatggcgaaatgttctgccagcagcatgatgtcttgctgacgctcgcgcagcggcggcagttgaataacgtcgaaggccagcctgtcgagcaggtcggcgcgaaactttccggcggcggcaagggcgggaggtcatcgttggttgcgcacaccagacgcacatcgacctggagcggctggcttcctcctacgcgttcaaggtggccgtattcgataacccgcagcagtttttcctgcaccagcatcggcgcggtcgctaattcgtcgaggaacagcgtgccgccgtcggcgcgttcgaagcgcccaagatgacgcttctgtgcgccggtaaacgcgcccgcttcgtgtccgaacagctcagagtcgagcaggttctcattcagcgcggcgcagtttagtgaaataaaaggcccctgccagcggccggacaaatagtgtaaacggtgagctatcagttccttacccgttccgcgttcaccggtcaccaatacgggcttgtttaaggctgcaagctgtgagacctgttccagaacttcaataaaggagttggcttcgccgagcagattatcaatagtcgctgtcatggtgaaatttaccaacctttagttaatttaatcatcattgacgtaagcctagcagaagctgaaataaaaaaactgtttttattcagtcggataataaatttaaaaagttggcacgcgtcttgtaatacctgatgcaggattaacagcaatggccgccgactcggcgattgtctcgatactgtcggccagctggccgttaaatgaaaagtcaaagaggaacgttgattatgggtattttttctcgctttgctgacatcgtaaacgccaacattaataacctgcttgataaagcagaagatccgcagaagttggtgcgcctgatgattcaggaaatggaagatacgctggtggaggtgcgctcaacgtctgctcgtgcgctggccgagaagaaacagctgaaccgccgcatcgaacagggcgaagcgcaacagaaagagtggcaagacaaagccgaactggcgctgcgtaaagagaaagacgatttggcgcgtgcggctctgattgagaaacaaaaactcgtcgagctggtggctacgcttaaacatgaagtcatcacggttgaagaaacgctggaccgcatgaagtctgaaattggcgagttggaaagcaagctgactgaaacgcgtgcgcgccagcaggcactgactttgcgtcatcaggcggcctcttcctcgcgcgacgttcgtcgccagttggacagcggcaagattgatgaagcgatggcgcgttttgaacacttcgagcgccgtatcgacagcatggaagccgaagcggagtcgatgagtattggcaaaaagaaaagtctcgaccagcagtttgccgagctgaaggccgatgacgaaatcagcgctcagattgaggcgctgaaggctaaaatgcaggccaacaaagacgcctaacgttcgcggttcattgcgcgttggcgaatgcgctttcttaaaaacgagctgcattcaaaacaaaaagtcctagaggacctaaaggagtagacatgagcgtcctatttttagccattccactgacaatatttgtgttatttgtcgcgccgatttggctgtggctacactacagcaaccggtcacagaacggcggtcagttaagccagaacgagtaccaaaatttacagcaacttgtcggcgaagcacgccgcatgcgcgaaaggatccaggcgctggaagaaatccttgatgccgagcatccgggttggaggcaatcttaatgtcaaccacgctgtcacaaaggaagctataccgtgtgccggaagagggcgtctttaaaggcgtctgcgccgggctctcgcactatctcggcgtaccggtcaaactgctgcgtctgattgtggtgctgtcgctgttcttaggcctgtttatgttcaccgtcgtggcctatttcctgttggcttggctcctggagccggttccgtcggaaattttcggcgacgagcagccggtgacggctcatgacctgctggtcgaagccgaccgcgaacttaacgccagtgagcaacgattgaggcaggtagagcggtatgtcacctctgaaacctttggggtacgcagccgcttcaaggatctctaagccaatcactttttcactttcgatttgacgctttttcaggaggacagtttatgcgttatgcatccgccgccgcggtatcagcaaacagtggcctgttgaagaaggcctttaaatttatcattatggtcgtcttgaccttcgcaccggcgggcgttgctgcccgcgtgctcggcctgctgggtaaaggtccgctgcgctatgtgctggctctgtttcttgagcctttagtcagaaggttgttaaccgccgtattcgggcgttatgccagggagagcaatgaaaagacttcaaaatgaattcacttctatggtcaaccgtggggtagaccgccacctacggcttgccgttaccggccttagccgcagcggtaagacggccttcattacctcattggtcaatcagttattacacgttcacagcggctcaagattgccgctgttttctgctgtgcgcgaagagcggttgctgggagtcaaacgggtaccccagcgtgaccttggcgtgtcacgttttacctacgacgaaggcattgcccagctttatggcacgccgcccgcatggccaaccccaacgcgaggcgtgagtgaaatccgtcttgcgctgcgttttcgctctaatgactctctcctgcgccactttaaagatacctcgacgctgtatctcgagatagtcgattatcccggcgagtggctgctggatttaccgatgctcgagcaggactatttgagctggtcacggcagatggctggcctgttacaggggcagcgcgccgattgggcggcaccctggcttgcactgtgccgccagtgcgacccactggcgccggccgatgaaaatcagctggcggccatcgcacaggcctacacggcttatctgctgcgctgcaaagacgaaggtctgcattttattcagcctgggcgttttgtgttaccgggcgatctggccggtgcaccggcactacagtttttcccatggcctgaactgcatcagtttagcgacagccagttggcgcaggccgataaacacagcaatctgggcatgctgcgccagcgcttcgactactactgttcgaacattgttaaaggcttctataaggaacactttgtccgctttgaccggcagatagtgctggttgactgcctgcaacccctaaatagcggtccccaggcgtttaacgacatgcgcctcgcgctgacacagctaatgcaaagttttcactatggaaaacgcacgctatttcgccgcctgtttgcccctgcatcgataaactgatgtttgccgccaccaaggccgatcatatcaccggcgatcagcacgccaatctggtttctctgttgcagcagttggtgcaagaagcatggcaaaacgccgccttcgaaggtatcagcatggactgcgccggacttgcttctgtgcaggctaccgagagcggactggtagagtatcagggccagtctatcccggcggtcaaagggcaccgtcttgaagacggtcaggcgttgacggtttatcccggtgaggtgccttcacgtttgccgggcaacgctttctggagcagcagggttttcactttgacgacttccgcccacgccagatgaacattgatgtgccgttgccgcatatcagaatggattctgtgatggagtttttactgggagataaaatgcgatgaacgagccactgaaaccgcgtattcatttcgaacagaacattcagcctcctgaagaacataagctccgggcggcacaaagtttcgacggtgcgcaggccgagaatttcctggccgtgcctgatactgacccgttgcttgcgcaggaaggacaggccgaggcggtggtcagccgagcgttgaaaccgcgccgcagtttgtggagtaaaatggttcggctcggcgtggtggtatttgctgcaagcttagtgggacagggcgttcagtgggtgcatcaggcgtggaatcaacaggactggattgcgctcggtgcctgcactgctggggattgattgttgtggccggtgtcgggtcggtactgaccgagtggcgacgcctttatcgtctgcgccagcgagccgatgagcgcgacgtcgcgaccgacctgttgcacagccacgcgctaggtcagggacgcgcattttgtgaaaaacttgcccgtcaggcagggttggaccaaagtcatccggcgcttcagcgctggcaggcttcgctgcacgaaacacacagtgaccgtgaagtcgttgagctttatgcgcgtctggttcagccggtgcttgacggacaggcgcgtcgcgagataagtcagtcagccgcagaatcagcgctaatgattgccgttagcccgttagcgttggtcgatatggggtttatcgcctggcgaaatctgcgtttggttaatcgtattgccagtttgtacggcatagagctgggctattacagccggatccggctgttccgtttggtattgctcaatattgcgttcgcgggagccaccgagctggtaagggagattggtatggactggatctcgcaagacttagcggcccgtctttcggcgcgtgcggcacagggtattggcgctggcttgctgaccgcgcgtctgggcgtcaaaacgatggagctttgccgtccgctgccgtggctcgaaggggataaaccgcgccttggcgattttcgcagtgaactcgtcggcaagttaaaggcgacaatgaacaaaagcgataaagcaaaatagtggcatggcggaggttctgtgaaacaggatcgccgctagaatagctaacaggcttaaggtattgcagaacagggaagtcgtaatgtgctgtcaagtgttttagacaaactttgaaggaattttacaacctgtagagggcaacgcgatggtggtgggggaaggattcgaaccttcgaagtcgatgacggcagatttacagtctgctccctttggccgctcgggaaccccaccacgaaattcgtggatttcttgttttactctttacttcagtacctgccgcgtggcttgtcgcggtaagcggggcgcatcatatcaaatgaaacgcagctgtaaagccttgaaacgcagaaaatagttaaaacaggttcgaatgccgattttttgcacgtgcgggcgttttactaaccaaaaacgcccgcggtaggcttaaagaatgaccgtacggttgccgtaaacaaatacgcgctgctgaagaactttataaattgcgcgactcagcacgtttttttcaacgtcgcggccggcacgcatcatatcgtcagcggtgtaagtgtgatcgacattgataacgtcctgcatgatgattgggccttcatccagattgtcattaacgtagtgcgctgttgcaccgatgatcttcacgccacgctcataggcctgatggtaagggcgcgcgcctataaacgccggcaggaaagagtggtgaatattgataacctggttcggatagtgctgtacaaagcccggcgttaacacgcgcatatatttcgccagtaccacatagtcaggctggtattggtcaatctgcgccatcatcgcgctgtcgtgctgctcgcgggtcagaccttcgtggctaaccagatggaaaggaatatcgaagcgctcaaccagcgtttgcagggtgtcgtggttaccgataacggccgcaatctcgacgtccaggccgccgtagacggatttcatcagcagatcgcccaggcaatgcgcctctttggtcaccaaaatgacgatacgacgacggtcggtgctttgtagctcacggatggaacctttcggcagcgcgctgtcgagatcggctaacaaggtgttgtcgttaaagatgccttccagctcggtgcgcatgaagaagcggccggtgcggtgatcgacatattcattgttctgcacgatattcagctcgtgcttgtaacaaatattggtgatcttggcgatcagccctttagcatcaggacaaatagtgcgtaaaactttggtttgaacgttgtgatgtgacatcagagtctaaatcctgtccccctcattattattgagggaatatgttaattatgcgtctatcgcgttggggcattatgccgcgttattttgcgcagcacttcttatattttttgccagaaccgcaggtgcaaggatcgtttctccctacctgcggcttaattccatcgacataataccagtgtttatttactcgaagaaagcgtgaacgttcgtggattagcacggtatctggattgccctcttcctgatagcgtgcagcgaactcaacgaaaccttcatcagcgcttttaccctttgcggtggcaacgacgttcagccccaaccagtgggtagagccaaacccttcgagcagggcagcccgcagttcgggaacgcggcagtcagggtgccagcttgcaatcaggtagtctgcattttcggtcacgtaagcgctgtaacgtgaacgcatcagtgcttcgggggtcgccgcagggcgcacgccggtgattgccggttggcaacattgttcaaactcggactcgctgccgcaagggcataaactgttcacattaactccggtaactggcagcgcgcagtgcgtgctattgaatgctaaagggcgttatgttacctaacattgtcaccgagtgacaacgcacaagcggcggcaaatactccgtcatcaggcagagataggaaaaataatggcacgacagctgaaaattggtctggctctgggctcagggcagcaaaaggttgggctcatattggtgtgatcaatgcgctgcatgagatgggaattgaagtcgatatcgtggcgggatgctcggtgggatcattggtcggtgcggcctacgtcagtgggcgtctcccggcgatggaaggctgggtaaggtcgtttagctattgggacgtattaaggctgatggacttctcatggcgacgcggcggtctgctgcgcggcgagaggatttttaacgccgtctctcagctgctgcgcatcgaagactttgagcaatgtaatcgaaaatttggtgcggtggccaccaacctcagtacggggagagagctttggctcactaaaggcgatctgcatcaggcagtgcgtgcgtcctgcagtatgccgggcctgctggcaccggtgtggtttaacggctactggctggttgatggtgcggtggtcaatccggtgccggtttcgctgacccgcgcgatggggcggatatcgttatcgccgttgatctacagcatgaggcacatttaatgcagcaagatctgctgtcggtacaggcaaatcccgacaacattgacgacgtcaaagagctcaactggcgcgacaaaattcgtcagaagcttgcccggccagtggtcagacagaacagccaaaccccaaccgcgatggaaatcatgtcgacgtctattcaggtgctcgaaaatcgtcttaagcgctatcgtatggcgggtgatccgccggacgtggtccttcagccgttttgcccacaaatttctacccttgatttccaccgtgctgaagaggctattgaggcggggcgactggcggttgagaagcagatggaccagctgctgccattggttaaaaacaatcatttctgaacggtttagcaacattccagcgttatctgataattctgacgggcaaaattacgctttataggccactattagggggaagaatttctgggagaccctgatggacaagccacttacaagcaagcacatcctgatcgtcgaagacgaagccgttttcagatcggtactggcaggctatgtgagttcgttaggggcaacctttaccgaagcggcaaacgggcttgaagccttgtctctggttgaggagtttccccctgatttaatcctctgtgatttggcaatgcctgaaatgggcggcatcgagtttgttgaaagcctccgcctgcaggggagcaagatccccgttctggttatctccgccacggataaaatgaccgacgtcgcgactatgctccgtttgggcgtagaagacgtgctgctcaaacctgttaacgacctcaatcgccttcgtgaggcgctattaaccagcctttatcccaaactgttttcctctcaggcgctagaaaaaagcgatttgatgcaagactgggaagcgctgtgccgcaacccgcatgaggctgcgagactgttgcaagagttgcaaccacctgttcagcaaaccctcgctcactgccgcattaactaccgccaactgactatggcgcaaaacgccggtctggtgctggacattgcggctctttctgcgaaagatctgggcttttattgcctcgatgtgacccgtgccagtgaaaacggcgtattggccgctttattattgcgcgcgatcttcaatggactgctgcgcgagcacctcagtaatcaaaatcagcgactgccacaaatgtctgcgctgctgaaacaggttaatcatttgtttaagcaggcccatttagagggcaattcccgatgttgatgggttattacaacgcagaacaaaaaaatctaattctggtttctgcaggattacatgccaacataaataccggcacaaatcagattcagctgagtaacggagtgcccctcggcaccctcggttcgtcttactccaatcaggtaagtcagcgttgtgaagcatggcaatgtcaggtttgggggccggtggtcgcctcagattaatgctttctgctgaataaaccctcatcgaagcgccgatttttaacgggtagaactccgcttaacccgctttatccctcagattttatggattattttccaagagtaatcttgggtcttgttccttgtccaacgcacgttggacgtcgcgaagccctttgaaactgttatactgccgcccaatattcgtcgcagcgattccaaaggatccggaaaaagcccgcgcttgcgtattacttaatcgtcttgcgagttttcaatattggggagttgctcatgaaagtcaccgtatttggaataggttatgttggcttggttcaggcggcggtgttggcagaagttgggcacgaagtgctgtgcattgacgtggatgccaaaaaggttgagaacttgaagaacggacaaataccgattttcgaaccgggtttgactccattggttaagcaaaactacgaatcaggccgcctcaaattcagcattgatgctgaagaagggttgcgcatgctcaggtgcagtttattgccgtcggcacgccgcctgatgaagatggatcggctgacctgaaatacgtaaccgccgtggcgcgcaccattgcccagtatatgacctcgccaaagattgttattgacaagtctaccgtgccggttggaacggcggacaaagtgcgtcaggttatgggacagactcttcaacagcgcggtattaagctctcatttgacgttatttcgaatcctgagtttctgaaagaggggctgcggtggctgactgcatgcgacctgagcgcatcgtaattggtaccgataatccagacgctatcgagccgattcgcgagctgtatgagccttttaaccgcaatcacgacagaatgatcgtgatggacatccgcagcgcagagttgacgaaatatgcggctaactgcatgttggccaccaaaatcagcttcatgaatgaaatgtcgaatctggccgagttattgggggcagatatcgagaaagtccgacaggggattggttccgattcacgtatcggctatcactttatttatccaggctgtggatatggcggctcctgtttcccgaaagatgtgcaggcattgatccgcacctcagaacaaattggctatcagccaaaactgcttcaggcagtggaacaggttaatgctcagcagaaatataaactgccgacgtttgttgaacgtcatttcggtaaaaatctagcaggaaaaacctttgcactttgggggctgtcatttaagcctaacaccgacgatatgcgtgaagcatcgagccgagtgctaatggaacaactttgggcggcgggcgcaaaaattaaagcctacgatcctgaggcaatgaatgaaactcaacgtatttatggtcaccgcagcgatttagaactgatgggaaccaaagaagcggcattacaaggtgccgatgcgttggttatttgtacagagtggcagaatttccgcgcccccgattttgatttgatgaaaagctctttaaagagcccggttatttttgatggccgtaatttgtttgatccggatcgactcgaaaaacgtggttttacctattatgggattggccgcggtgcatcagtgaatccggtattgtaaggagaaggcatgaattatttagtaacaggtgcagcaggtttcatcggttattttgttaccctgcggttgttggaagaagggcatcaggtaaccggtcttgataatctaaatgattactatgacgtcagtttgaaattggcgcgtctggcccagcttgaagccaaacccgctttcaagttcgccaagttggatcttgccgatcgtgcagggatggccgagctttttgccgtgaataagtttgaccgcgtaattcatttagcagcgcaggcgggggttcgctattcgatcgaaaatccactggcgtacgttgatgctaatgtcgtgggttttgccaacgtacttgaaggctgccgccataataaagttaaacatctgctttatgcgtcttcaagctctgtttatggaatgaaccgcaagcagccgtttgatacagaagataacgtagaccatcctatctcgctttatgcggccacgaaaaaggccaatgagttgatggcgcatacttattcgcacctgtatggtttgccgacaaccggaatgcgcttcttcacggtgtacggtccttggggcgtccagatatggcgttgttcaagtttaccaaagctattattgcggaccagagcatcgatgtttataaccacggcgaaatgcgccgcgactttacctatatcgatgatgtaacagaatccatcatgcgcctgcaggatattattcctcagccacagcctgactggacggtcgagacgggtgacggctccaagagctctgcaccttacatcctctataatattggcaatagcaacccgattaagctgatgacctatatagaggcactcgagagcgcgctgggcgttgaagcgaagaagaacatgatgccaatgcaaccgggtgacgtgcatgaaaccagctctgacagtacgccgttatataacgctacaggtttcaaaccgcaaacttcggtatacgaaggggtgaagaactttgtcagctggtataaagattattatcactgctaatcacaaagcagaagctgcgcgaataacaacaggctgccatggcagccttttttatgtccacttcagagagcctgaaggcgctctgatggattattgcccagcgtctgacttaaaaaataaaaaaccaccgcgttaacggtggttttgtgaaaacattatcttgagactggggtacagccaaaaaaacttacagcaggaaatcgtccagctgtttgccttcttcttcgatagctttcttgattaccgctggagtacgaccctggccagtccaggttttgctttcgccgttctcgtcaacgtatttgtatttagcaggacgggcagcacgcttagttttgccggttgctttagttgccgccatagtagacagcaattcatttggatcgatgccgtcagcgatcagcatttcgcgatattgctgcagtttacgagtacgctcttcaatttccgcagcggctgcagaatcttcttcacggcgctcattaacaacaacttctaatttctctagcatttcttcgagagtttccagggtacattcgcgagcctgtgcacgcagagtacggatgttgttcagaatttttaatgcttcgctcattatacaagtctcaatttaattagtggggggcgtttcggtaataatagaatgctcttctgtattctgcaatagccaatttgttatgttgacgggaatttaccatttataagcaatattgtttttcactgtgagaaatataaacccgattaactctgtattaaagttagcactataaggcaaattgattgtccttttgtgcggtaagccacagcttttaatcgtctcttttataaccttggcggacaggttacaaatatcaatagaccttacgtataactgacaacattagccttgagaaatcctcaagcattttagctatatgtgccctccagcgatcgattaacccgctaaggaagggtccgaatttataaccttactggaatagagtattgcttaataattgatttatacgggcactttccagagatcttatcgggaatctccctgttaggttaactaattaggaagaagagtaatcacaatatctgattgtaaaactctgtaatcaacctgctgctttattgtctatgggaccggttacaggcaggcatagtcaatgcctatagcttctggcggtgtgttacaattgaaagcaagaggcgtttcggaattcattatactgttggagttaagggctcatggctcaactttatttttattattctgcgatgaatgcaggaaaatctacatctttgttacaatcttcctataactatcaggaacgcggcatgcgcacgttagtgctgactgcggcaatagataaccgtttcggggaagggaaggtcagctcgcgtataggattatcttcacccgctgaactttataatcaagataccgatttgctggcgcttattggcgaagctcatgaggcgcaaaccttgcactgcgtgttaatagacgaaagccagttcctgacgcgcgggcaggtggaacaattaaccgaggttgtcgacaggctcgatatccccgtgctgtgctatggcctgcgtacagactttcgcggcgagttatttagcggcagtcagtatttgctggcatgggccgataaactggtcgagcttaaaaccatatgccactgcggtcgtaaggcgaatcaaaccctcaggctcgacgagaatggaaaagcccttcacgatggcgctcaggtcgttattggggggaatgagcagtatgtctccgtttgccgcaagcattataaagaagccatggctgaatgaaaaagcctgaaggggtcgcaatgataacctttcgtttacattagtcttacgattctattatttgtattggtgataataagcaaaaaccattaatacacttaatgtttcagcacattcttaaggcataaaaagaaacccgccacatggcgggtttcttttttaacgcgtgtgactgacgattactttttggcttttttaattcctggagccttcgctgcgtctgccacgatagtcacgggttcctgtttggttaccacactcagcggcaattcttcactgaatttattgccgtagtaggtatcaatcagaatttgtttaagctctgaaatcagcggataacgcggattagcgccggtacactggtcgtcgaacgcgtcttctgacagtttatcgactttagacaggaagtcggcttcctgtacgcctgcttcacgaatggaggtaggtatccccaattcagccttgatttcgtctaaccaggccagcagtttctcaatcttctgcgcggtacggtcacccgcagcgctgaggcctaaatggtcggcaatctcggcgtagcgacggcgcgcctgtggacgatcgtactggctaaaggcggtttgcttggtcgggttgtcattcgcgttgtagcgaatcacgttcgaaataagcatcgcgttggcaaggccgtgtggaatgtggaactcggagccgagtttatgcgccattgagtgacaaacccgaggaaggcgttggcaaacgcgataccggcgatggttgcggcgttgtgcacgcgttcacgggcaaccggattcttcgcgccttctttatagctagctggcaggaactctttcagcagtttgagcgcttgcaaagcctgtccatcggaaaactcgttggcaagaacggaaacgtaggcttcgagagcgtgcgttaccgcatcaagaccgccgaaggcacagagcgatttcggcatgttcatcaccagattggcgtcgacaatcgccatgtccggagtcagtgcatagtcagccagcggatatttctgcccggtcgcatcgtcggtaacgaccgcgaaaggcgtcacttcagagcctgtccctgaggtggtagtgatagcaatcatcttcgctttcacccccattttggggaacttgtagatacgtttacggatatccataaagcgcagcgccaagtcttcgaaatgcgtttcgggatgttcgtacagcacccacatgattttcgcggcgtccatcggtgagcccccgccgagcgcgataatgacgtccggtttaaaggaattcatctgctcagcgcctttacgcacgatactcagcgttgggtcggcctctacttcaaagaacacttcggtttcaataccgtggcttttcagaacacgggtcacctggtctgcataaccgttgttgaacaggtaacggtcggtgacgatgaacgcacgttttgcaccgtctgttgccacttcttcaagtgcgataggcagtgagccgcggcggaagtagatggatttcggaagtttgtgccacagcatattttctgctcgcttcgcaacagtcttcttgttgataagatgttttggtccgacgttttcagaaatggagttaccgccccatgaaccacaacccagcgttagtgaaggtgcaagtttgaagttgtagaggtcaccgataccccctgagaagcgggcgtattgatgagaattcgtgcggttttcatcttgtcgccgaagtagcgaacgcgctctggctggttgtcctggtcggtatagagacaagaggtgtggccgatgccgcccatggtcaccagtttctcggctttatcgaccgcatcttcgaagtttttagcgcgatacatcgcaagcgtcggtgaaagtttttcgtgtgcgaaaggttccgactcgtcaaccttggaaacttcaccgattagcactttggtattggcaggtacggtgataccggccatggcagcgatcttggttgcaggctggccgacgatgtcggcattgaggccgccatttttaagaataacgtcctgaaccgccttcagctctttcccggccagcatatagccgccgtgtgatttgaagcgttctctgactgcctcataggcggaatccacgacgataacggactgttctgaggcacaaattacgccattgtcgaaggttttggacatcagaatggatgcgacaacgcgtttgatatcagcagtttcatccaccacgaccggggtattaccggcaccgacgccgatggccggtttacctgagctgtaggcggctttaaccatgccaggaccgccggtggcgagaatcaggttaaggtcagggtgatgcatgagttcgttggacaacggcacacttggtgcgtcaatccagccgataatgtctttgggtgcaccggccttaatcgctgcctgcagcacgatattcgcggctttgatggttgctttagccgcacgtgggtgtggcgagaagataattgcgttgcgggttttgaggctaataagggctttgaaaattgcggtagaagttgggttggtggtggggactatcccgcagataatgccgataggttcagcaatggtaatggtgccgtaggtttcgtcttctgcgacgacgccacaggtcttttcatctttatatgcgttgtagatatattctgaagcgaagtggtttttaatcactttgtcttcgataatacccataccagattcttcaacggctaatttggcaagaggaatacgtgcgtcagcggcggcaagtgcggcggcccggaagattttatcaacctgttcttgtgtgaactctgcatactcacgttgtgctttttttacacgagcaacaagctcgttcagttcagcgacgtttgtgactgccatggtgttctcctgagaatgttaaacttttttagaaaatagccgggccaggctccaagtatagtcgtgcccaacaatgctgccggaacatttaaaactcactatttatcaaaggaatgcgtggtctgtttttctattttctaaaaaggtttctaatcaattctgatggcgcaggacataaattgttaaaattatcgcgactccatcatttgttctgttggtaaaacgagccgcttttgttgccgtggaataagcttaccgactaatgagtaggctgaatatgatccagatcaagttaaaatctaaagctgactcctttcagctctctgtttgttaattgaatcgattaattgaagcaaaattgttagtcgttgaccgctgccgttaatgagcgttttttcagcaatttaatgctggtgttattcactgctttgttctgaaaatctagaggtatatgctgaataacttcgtggcgtatgggcggcgattccagtacattagcgcccattaatcaccccccttttttacctcttatgcggagtactgcgtgagtcagacaattttggatttctcgggttatatcaagttttttgtcggcctgtttgcgctggtcaacccggtggggatcctgccggtatttattagtatgaccagctatcaggcagcagcaggacgcaataaaaccaatatgacggccaatctttcggtcgcgattattttatgcacctctctgttcctcggtgacgccatcctgcatctgtttggcatctcgatagattccttccgtattgccggtggtattctggtggttaccattgcgatgtcgatgattagcggtaagctgggtgaggacaaacagaacaaacaggagaagtcggagaccgcaatccgtgaaaacgtaggcgttgtgccgcttgcgctgcctttaatggccggtccgggggcaatcagttccaccatcgtctggagttcgcgctatcacagctgggaaaacctgcttggatttacgctcgcgatcgttatcttctccttctgctgctggttgctgttccgcgccgcaccgttggtgatgaaacttttagggcaaaccggtattaacgttattacacgtattatgggattgttattgatggccttaggtatcgagtttattgttaccggtcttaaagccacgtttcccggcctgctgtaaagaaaatccggcatgaaaaataattaagcaagggcgctgacgcccttgcttaataaagaacgatgaaacttttctcttatctcctgtggttacgttgcagaagatgaggcaggtgaagaatggatatcaaacaccaccttgtcactctcttcatcgaaacctatctcgaccgaatcccctgatttaagtttgtcgcccagtatttccttcgcgagtttagtttctacctcctgacgtattttgcgtttaagctcgcgtgctccaaaatcaggttgatagcccacttcggttaaatggttaaccaggctttcggcaacagtgagggtgatatcctgcgccgccgcagtgcgggttagccggtccagctgaatttgaacaatcaggcggatattttctgacgacagcgagttaaatacgattatctcgtcaatacggttgaggaattcgggcctgaagtggcctttgaggacttgcatcagttcatcgcgaatttctttatccggcctgcgttcattttccggtagcgatgaattggccataataatcgccgaccccaaattgctggtggcgataatcgtagtattactgaaatcaaccacgcgacctttgccatcggtcaggcggccgtcatcaaacacctggagcaacacgttataaacgtctggatgcgctttttctatttcatcgagcaggataacgctgtagggacggcgtctgacccgttccgttaactgaccgccttcgtcatagccgacatatcccggaggcgcgccaatcaggcgtgcgaccgtatgtctttccatatattccgacatatcgatgcgaataatggactgctcatcgccaaacaccgcttctgcgatggccttcgccaactcggttttacctacaccggttgggccgaggaacaggaaagtggcaatcgggcggtgcgcctgacccagaccggcacgagacaaccgcactgcgtcgcttacggcggtcacagcgtcttcctggcccactacgcgttcacgcagtttatcttccatgttaagcagttttttacgctcttcctgcgtcaaatcagagaccgggatccccgtcaggcgggaaactacttcggcgactgacgcgacggtaacctcaagggtttctgacccggttttgttattccacgcctcggtcagttcatcgaggcgtttctgtttatcctcaatatctttctcaaatttcttcacgtcatcaaactgtttgcggctggaggaatagtcccgttcgcgtttgacgtgagaaatctgtgcctcgagctcctgcacctccgccgggcgagaggtcgagccaatcctgacgcgtgccgccgcctggtcaatcaggtcgatagctttgtccggcaggaagcgcgaggtaatgtagcggtccgagagctcggcggcagcgacaaaggcttcgtcggaaaaggtgacctggtggtgcgcttcaagcgtgtcgcgcagcccgcgaaggatcatgatggtctggtcgacggtcggttctggcaccagcaccggctggaaacgcctttccagagccgcgtctttctcaatgtgtttctgatattcgttaagcgtagtggcaccaatcaggctgagttcaccgcgggcgagggcaggcttgagcacgttggcaatatctaatccgccttcgccaccgccttgacccgcgccaacaatggtgtgaagttcatcgataaacaggatcagctcgccttttttggccgtgacttcatcgataagctgtttggcgcgctcttcaaactcaccgcgatatttcgcgccagcgaccatcgagttgatgttgacctcaaccaatcgcttaccgcgcagcacctcaggcacgtcgcccttaacgatgcgctgtgctaacccttcaataatggcggttttaccgacgccgggttcacctatcagcaccggattgtttttcttacggcgtgccaaaacctctattgtgttctcaatttccagggctcggccgagaaccggatcgagcttgcccgctcgcgccatctcggtgaggtcacgaccaaacttatccagattcggggtgccggtaggcgtatcgacgcggccgtcttcagcgcctttgccaacgatttttaccactttctggcgaatcgcttcaggtgagatgccgtattttttaagcaaagaaccggcgacgctgtcggtgacttcactgagaccaatcagcagatgctcggggccgacgtaggagtgccccaactcgcgagaagcctggaatgcaaacataaaagcctttttcaggcggggcgaaacgctcatatcatccatcgatgccccggtctctgtggcgccggaataggcattctgatcgatataattttttatatcctcaggggagattttgaattctttgaacagggtggtgcagacgtcggtatcggcaagaacgtaaagaaggtgttcggtatcaagctcgctccgatttagcgcgtgggccttttcggctgctttctgcaaaagctcgagcgactgtttgctaaacgcttctgtggtgtcaacggactcgcggggcacctccccaaacgtgctctcgtcgtttgatctgccctgagtgaaattattgaagaaaccggataacccatcgcgtcccccattccacctaacagggagtcgaaagggttaagcacattttggtgccgcatcagctggcggtaatcataatcacagattgctatcgtcttgcgctgaccgttttgcacgatggtgactctgcctgaagcaggcctggcgttacagatatcgcataaagttggcattgaacatctcctgttgttttcaggttataggttcagtacgtcatgcatcccctgaacgagtcgataattcaccttaagcatagccgaggggctaagagtggagggtggtactttatgcgcatttctgttttatagcggtacctgtcaagtaaaataccgcgctaaacattgaataagatataacggaggggaattattgccgcgggattataaagataggtgcaggggtgtttaaattcgaaatcagattattaaaacagatggcgatcacacaattgaacaattattaccaaatctaataatgtggcgcattataatagtgcatctaatgactctaaaatgtgctgctgcacccaaatgtggcataaaattgcctcttgccctctatcgtccttaagactcctatttattacccttttctttgccatttcaggcacttttttcgacttttattgcccgttttgacgttaaattaatcacatcattctgtagcacttgtacatgccgtgacgagatgttattagtgtttacctcgcacttaacaggggtttattcttaaaagtaagcttatgttaacgtaatgtgtcagtgcaatttttaatcataaagctgacttaattttagtgctaaaattttaaaaaatattttaataacaagatattaagttgatttttgttgcctggaactcactggtccgtctacctgcagggtcggataaaagagaattggttaacatttccgtaaaatttattggcgcgaaaatttgtcatctgataattttcggccacattcccaaatggaaaatgtttcggcatatcgccgaagtgagaacggatcttgctagagctttaccagccaagagcttaaagacttctttttcactttttcaggagagagcgcggttgaacaaaaaatgtacccatcaagctgcagcgcccgttatacaaggcgattcctcaaattcaaagcagctggatacgacaacgcgcctttactctgacattgaaaatcaattctctctgcttttcgaaatataaataacttcacccacgactttaattaatcgaaggggacgctttgcacatttcctgcaatggattgtgaataaaagccttagtcaacaagcgcttcacgaggtaaaggtaactttattcctgtgaggtaataacgcagtgaaggtaatgcaataggggtgttaatccagcgcgattaactgactacttaccgtttctacgtgagtaattcgttcctgctcatcgcgaaactaaacccggaaggggttggcctgtttacaggcaaataataacaattggagttgatattaatgaccaacatcacaaaaaaacaccttctcgccgccggtatcctggctgcatttggtgcagtaacctccaccagcagcttcgccgccgtcgttccggctggcgttcaattggccgccaagcaagagctggttcgtaacaacggcgatgaagttcagtcgcttgacccgcacaaggttgagggcgtgcctgagtccaacgttattcgtgacctgctcgaaggtctggtagacaccaacgtcaaagacggtagcgtggtaccgggcgtagctgaaagctgggaaaacaaagactttaaagtctggaccttccatctgcgcaaagacgccaaatggtcaaatggccagccggtaaccgccgctgatttcgtttacagctgggaacgcctggctgacccgaaaaccgcctctccgtatgaaagctacctacaatacggccacattgtgaatatcgacgatatcatcgccggtaagaaaagcccggacacgctcggtgtcaaagccatcgatgaccacactctggaagtcaccttgagcgagccggtgccttattttgtgaaaatgctttcccacaccgccatgaagccggtgtacaagcctgcggtcgagaagtttggcgacaaatggactctgcctgaaaactatgttggcaatggcgcgttcaaactgaaaacctggaccgttaacgaacgtatcgtgctggtacgtaacccggactactgggacaacgcgaaaaccgtgctgaatcaggtgaccttcctgccaatctcttccgaggtttctgacgttaaccgctaccgcagcggtgaaatcgacatgacctacaacaacttgccgatcgagttgttccagatgctgaagaaagacagcccgaaagagctgcacgctgacccgtatctgtgtacctactattacgagattaacaaccagaaagcgccgttcaacgataaccgtgttcgtaccgccctcaagctggggttggatcgcgacattatcgtcaacaaggttaaagcccagggcgacctgccggcttacggtttcactccgccatacaccgacggaacctatggcaagctgacgccgccagcatggtttaaagaaactcaagaacagcgtaacgcggaaggtcgaaaactgttggccgaagccggttataccgccgataagcctctgactttcaacctgctttacaactcttccgacctgcacaagaaactggctatcgccgccgctgctatctggaagaaaaacctcggcgtagacgtaaaactcgaaaaccaggaatggaaaaccttcctcgaaactcgtcatcagggcaactttgacgtcgcccgtgccggttggtgctccgactataacgagccgacctctttcctgaacatcatgctttccgacagcagcaacaacaccgcgcactataagagcccggcgttcgacacaattattgctgatgcactgaaggcgaaaacagacgaagagcgcgccgatttctatcagaaagcggaacagcagctggataaagactcgccgatcgtgccggtttattactatgtgaacgcccgtatggttaagcaatacgtgggggttacagtggtaaagatccgcaggataacgtttacgacaaagatctctacatcatcaagcactaaataatgaggaagcagggcggttacccgagccgctctgcttttgtgtttgattgagacttcagcaactggctgagcaaagcaggtacgagcaatgttaaagtttattttacgccgctgtctggaagctattccgacgcttttcattctgatcacgatttcgttttttatgatgcgccttgcccccggtagtccgtttaccggcgagcgtaatctgccgccagaagtgatggccaacattgaggcgaaatatcacctcaatgatccgatgtacaaacagtatttccattatttagaacaattggcccacggtgattttggtccttcgttcaaatataaagactatagcgtcaacgatttggtcgccacgtcgttcccggtttcggcgaaattaggtcttgctgcctttattctggccatcgttctcggcgttactgccggcgtcatcgccgcgctgaatcaaaataccaagtgggactacacggtgatgggctttgccatgaccggggtggtaatacccagttttgtggtcgcgcccttattggttttgatcttctccatcatgctcaagtggctccctggcggcggctggcataacggtggcttcaaatatatggtgctgccgatggtggcgctttctctggcctatatcgccagcatcgcgcgtattacccgtggttcgatgattgaagtgttgcactccaactttatccgcaccgcgcgcgccaaaggcctgccgatgcgtcgcatcatcttccgtcacgcgctgaaacctgccttgttgccggttatctcctacatggggcctgccttcgtcggtattatcaccggttcaatggttatcgaaagtatttacggacttccgggtatcggtcagctgtttgttaacggtgcattaaaccgtgactactcgctggtattgagcctgaccattttggtcggtgccctgactatcctgtttaacgcgatcgttgacgtgctgtatgccgtgatcgatccgaaaatccgttattaatactggagcacgccaatgatgttaaccaagaagaaaaacagcgaggctctggagcaatttacagagaagctggagatagaagggcgcagtctgtggcaggacgcccgtcgccgctttattcataaccgagcagcggtgactagcctggtcgtactggcggttatcgccttgttcgtgacctttgccccgatgctggcgcatttccgctacgacgataccgactggaacatgatgtcggccgcgcctgatattgcctcaggtcactattttggcaccgactcgtcgggccgcgacctgctggtgcgcgttgctatcggcggccgcatttcgctgctggttggcgtatctgccgcgctggtagccgtggtgctcggcacgctttacggttcagtttcgggctatctgggcggtaaaatcgactccgcaatgatgcgtttgctggaaatcctcaactccttcccgttcatgttcttcgtcatcctgctggtgacgttcttcggacagaacatcttcctgattttcgttgccatcggcatggtgtcatggctggacatggcgcgtatcgtccgtgggcaaacgctgagcctgaaacgtaaagagtttattgaggccgctctggtcagcggcgtctcgacgtggaatatcgtactgcgccatatcgtccccaacgtactgggtgtggtggtggtttacgcctctttgctggtgccgagcatgatcctgtttgagtccttcctgagcttcctcgggttgggaacacaagagccattaagcagctgggcgcgctgctgagcgacggcgctaactcgatggaagtgtcaccctggctgctgttcttccctgctggcttcttggtcgtgacgctgttttgtttcaactttatcggcgacgggctgcgtgatgcgctcgatccgaaagatcgttaaggagtgcgatgatgagcaccattgaacatacccccgcactccacaggccatcgaggtcgatgcgccaccggttctgctggacgtgaaagacctgcgtgtgacttttggcacgcccgacggtgacgtgaccgcggttaacgatcttaatttcgacctgcgcgccggagagacactgggcatcgtcggtgagtctggctccggtaaatcgcagaccgcgtttgcgcttatgggtctgctggcaagcaacgggcgcatcggcggatcggcaaaattcaacggccgtgagattcttaatcttccgcaaaagcagttgaataaactgcgtgccgagcagatttcgatgattttccaggacccaatgacgtcactaaatccttacatgaaggtgggtgagcagctgatggaagtgctgatgctgcataagcacatgagccgttccgaggcgtttgaaggatcgattcgcatgctcgacgcggtcaagatgcccgaagcccgcaagcgtatgaagatgtatccacacgaattttcaggcgggatgcgtcaacgcgtgatgatagcgatggcgctgctgtgcagtccaaaactgctgattgccgatgagccaacaaccgcgctggacgtgaccgtgcaggcgcaaatcatgaccctgctgaacgaactgaagcacgagtttaataccgcgatcatcatgattacccacgatctcggcgtcgttgcgggcatctgtgacaaggtgctggtgatgtatgcagggcggactatggaatacggtcaggcgcgcgacgtgttttacaccccgagccatccttattctgtgggtctgctgaatgcagtgccgcgcctcgacgctgagggtgagtctttgctgaccatcccgggcaatccgcctaacctgctgcgcctgccgaaggggtgtccattccaacctcgctgtccgtacgccaccgaaatctgtgcgacggcccctgcgttagagcgctttggcgatggtcgcctgcgtgcctgcttcaagcccgtggaggaactagtatgagcgaagtgattagtataactccggcgccggatacctctcccgtggaccagagaaaagtgctgcttgaggtcgccgacctgaaggtgcatttcgacatcaaagacggcaagcagtggttctggcaaccctcaaaaactctgaaggcggtcgatggcgttagtctgcgcctgtatgaaggcgaaacgctcggcgtggtaggtgagtcgggctgtggtaaatcgacctttgctcgtgcgctgattgggctggttaaggccactgacggccgcgtagcctggttgggtaaagacctgctgaatatgtctgctgccgaatggcgcaatacgcgcagcgatatccagatgatcttccaggatccgctggcctcgcttaacccgcgtatgacgataggtgagataatcgccgagccgctgcgcacctataatccaaaaatgccgaaacagcaggttaaggagaaggttaaggcgatgatgctgaaggttggcctgctgcccaacctgatcaaccgctatccgcacgagttttccggcggtcagtgtcagcgtatcggtatcgcacgtgcgcttatccttgaacccaagctggtgatttgtgacgagccggtctcggcactggacgtctcgattcaggcccaggtcgtcaacctgctgcaacagttgcagcgtgagatgggcctgtcgcttatctttatcgcccatgatttggcggtggttaagcacatctccgaccgcgtgctggtgatgtatcttggccacgccgtggagctggggacctatgacgaggtctatcataatccgctgcacccgtacacgcgtgcgctgatgtcggcggtacctgtaccggacccggacaaggagcgtaacaagaccattcagctgctggagggagagttgccgtcgccgattaacccgccgtcgggatgcgtgttccggacccgctgtccgattgccgggccggaatgcgccaatacgcgccctctgcttgagggaagcttccgccacgccgtgtcttgtttgaaggtcgatccgttataatctgccggcgcaaagacaaaaaaccccgcaaagtggcggggtttttcttttgtggtacgcgcgttaacgcatcactctttccacagaatatggcaaagcttatggtctttttcacggcatagcagcacgcgagcaaagacgtcgttgatgggctcaccgtctgcgtcggctagaccaataacgacttcagcgaagaagtcgggttaaggtcaaaatcaacgtgctcggcccagtcttcggcagggtcatacagttctgcgccaccgcgctcctcaaactgcaggttaaagatcaggatatccgcaggatccaagttatctccagccagttcgaggaagatgtcgtaggcttgctcaagggtttcgtcttcggtcaggcgattattcagatccatattcttctcattcaatagtttgtggtgtgataagccatcggcaggatgcagcgactgcgcctcgtggccgactccttatgacatgacctattagaacattctcgccgctgcttttacagtaacggactgaaaaagtagaacaggcgctcaacgatacgatgccagaaaggtcgcttgagccagaccttcgggtcgaggaggcgagagcgcgcgagataatcttcctgcaccacggctaggtcggcaccaaaaccggcgtcatcaatgaccagcgtaatctcaaagttcaaccacaggctgcgcatatccagatttaccgtgccgaccagactcaactgcccgtcgaccagaatgcttttggtatgcaacaggccgccctcaaactggtaaatcttgacgccagcctcaagcagctcgttataaaatgcccggctcgcccagccgaccatcactgaatcgtttttcattggcataataatgctgacgtcgactccacgctgtgcggcggtgcaaattgcgtgtaataagtcgtcactcggcacgaaataaggcgtggtcatgaccagctgttctcgcgctgaataagaggcggtcaaaagcgcctgatggatcatgtcttcagggaatcccggacccgaggcgataacctgaatagtatgcccgctctcctgctcgaacggcatttgattgacctcaggctccggcggcagaatacgcttaccggtctctatctcccagtcgcaggagtagacgatacccatcgtggttgccactgggccttccatacgcgccatcagatcaacccactggcccacgccagcatcctgcttgaacaggcgcggatcgaccatattcatgctgccgctgtaggcgacgtagttatcgataagcaccaccttgcggtgttggcgcagatccatacgacgtagaaacacgcggaacaggcttaccttgagcgcttcaacaacttcgataccggcgttacgcatcattgccgggtaagggctgcggaaaaactgcaggctaccggcggagtcaagcatcagtcgacagtgcaccccacgccgcgcggcggccatcagtgactcggcgacctgatctaccaggccgccgggttgccagatatagaacaccatctcgatgttgtgccgcgccagttcgatatcacgcatgatagattttagcgtgtcgtcgctggtggtgagcagttgcagctgattgccttttacgccaccaattccctggcgacgttcgcaaagctggaacagcgattttgctacatcgctgttttcggtagcaaaaattcgatgacaacctttgagatcgttcagccaatgcgcggttgagggccacattgccttggcgcgttccgcccgccgtttgcctaaatgcagctcaccaaaagaaagataggcaatgattccaaccaacggaataataaagataatcaataaccaggccatggccgaaggtacggcacggcgcttcattaaaatgcgcagcgtaacgccggcaattaataaccaataaccgaagaccataagccaactgattactgtataaaatgttgtcataagggcgaaaaatcctgttcgcgagcaatttggtgagtgtacgcagagtgcgctaaaggttaaaccttttataaaattttatctgctgcttcaatcggctagctctgattgagttgtcgacaaaggtaataatccaacgaagcatgtaattaagcgtagctaaaactctcaatgataaggtctagatgatctataatgttcgcgctatttaaacagagacccttattaaaggaatatttgttgtatgaaacgcagtagaaatgaagtggcccgttggcgtatgcagcgtcagtctcagagaagaaaaagccgctggcttgaaggacagtctcgacgctatcggcatatttaccgtattcgagcgatccattgtctacagcaacagcgtgtcagcctgtttagagtcatccacgtctggtgatgaggcaatagggctttctcgtcaggtgacaataataggtcatcaacgtgtgatgaaagaatattgggcgcgtagagcgcctttttttacgcctgtccgttgtcgcccacgcgaaaaagggcgccgcatctcgggcaaaccagcgtcgcgtttttacgcactttggcacttaactgctcggtcgctgccttgcattctgggcacactaccttgctcgttttactggtcagaaacttcaatccgtcgaagaatgacataatggggtaacctcacaggttgggggaatcagtctaccacgtaagcctgaggttagcttggcacttcagaatgaaagaagcagggtacccctgcttctgtgaaacccggccaaaatgacggcttagatggttttcttaaaaggtttaacggtcgtcttgtggtacacgcctgccagcatataagggtcaacttcggcccagcttttagcggcttccaggctttcaaactcagcaatcaccagtgaacccgtcatgcccgcatcgccaggctcttcgctgtcgatagccggaagtggtccgcccaccagaactcggccctgatctttcagcttttgcagacgatcgatatgcgcagggcgcgcgatgcgtcttttttccagagaattggcaacatcttcagaatagatcatgtaaagcatggttcaccttgtcatttgttgtcaaaatatcgaatacatcctaatgcgttcgtttcattagggtgagttaccatagcgaaaccctgtcctcagggaaagagggatggatgaatcaaaagtgcagtatttgagaatagttttcatctccttattgaatatgattgctatttgcatttaaacttgcggattcacggggaaattgaatcattatgcagccaagagcgatgtctttaactaatgccatgccgttaaaaaatcagtcaatcattcgcagagtaacattgccggccctgctctctatcggcatccatgccgcgcttattgcggccttactctacgtgaccctcaccgatgccgttaagatgcccaggcaggaagagcacgtgatgagcgtcaccatggttaatccagagaccttcgctccgccgccaacgccacagcctgaggtacagccgcagcccgaccctgagccggagccggaggtcaaacccgatccggtggtgacgcaacccgttgctgtgccgttgccagaacccaagccgaagccaaagccgaagccgccaaaaccggtcaaaaagccgctcgaaaaaccgaagccaaagccgcatccgcagcctcagcagaaaccggtcgagaaaacgcaggaagtcgccaaagccgagtcttcgccttttgctgcctcaaaagcgcctgtggcacaggcgccaaaaccggcagcgcaaaccaatggcgcgagcagtggtccgcgtccgcttgagcggggtaagccgcagtatcctgcgcgcgccttcgcgctgcgcatcgaagggcgggtcaaggtgcaattcgatgtagacagcgacggtcgcgtggacaacatcagaatcttgtctgccgagccgcgtaatatgtttgagcgtgaggtgaaaatggcgatgaacaaatggcgctatgagcctaaacaggccaaaaacctgaccgtcacgctggtatttaaaatgaacggcggcggtggcctcgaggaataatttcttaccatagtctgctgctaaaggaagggataaaacgccggttttatcccttttttattatttctgcgatcgcccctatttttaaacgctgttttttcgaacacactcctgttttattgtctatcctctaaagggttagcggtaatttgttcttattatttaaattaaataagaatatacccttatcaaagccagtgctttcatatgaatgataattggttgtcgcatattttcgtgacccaggtgggtcatcgaggggacttctgttgccatctatcacttcatgtcattaatttatagaggaaataattatgacgcataatgatcccacgctttattcatcacatgatggaataactaccgaggcctatcgtctcaatattcggcggatttcatgggggcggtatttgccggcgttattctctccatcgtgacctatttgctgctctcgatgctaggcaccgccattggtgcatcgacaattgatccactcaaggagtccaatccgctggatggactgggcaccggtgcactcatctggacgctggtcaacgtgctactttcctatgcggttggtggttatttcgcggggtatttggcaagaagagaaggggcattgcacggtgtgctgtcgtggggcgtcgtgaccctaatttctgcttatattattgccacgctgttcggtagcgcactcggtggcgcaatgaacgtcgccggcgaaggcctgaaagcggttggcagcggcattgctagcgcggtgccacaggcgggaagcttggtcaagaatcagctccagcaggctaatatcaatctcgatgacctgcagaatgaactgacaacgacgctgcgccagacgggcaaaccagagcttcagcctgaaaatctgaagggccaggcacagggtgcagcggatcaggctatgcagcaggcgggcagttcgcaggctccggaccaggatattaaacaatggctaagcggcgttatctcgcgcggtgacagcacgctgcaggcggcggaccgcgacgcactgaaaaatatcattaaggcgagaacgggtaagtcggatcaggaagctgaccaaatcgtcgataaagcgcagcaggcgtatacgcaggcctatcagaaatatcagcagttaaaggcagacgccgagcagaaagctcgtgaagtggctgacaaggccgcggctcagctttcaaaagccagctggttcgccttcgtcttactggtgatcggtggggttattgccggttttgcaggagtatggggttttcgtacccagctgcatcacgtggcgcatgaagacagagcgcgcgtgaatcataacgtgaagccgtaacgtagaaatacgtcgcggccacacggctggccgcgacgttcattaaaagagttgagaacaaatggcggttagtcgtccagcgaacctgcggtttctacgctgaagttgctgcgaccttccggcaattgacgggatttcccctgatcgtctacggcaacgtaggtaaataccgcttcggtcgcgatatagcgctggccgataggctcagaagagactttcttgacccatacctcgacattgatagtaatagagctattgccggttttaatacagcgggcataacaacaaaccacatcacctacggccaccggttttaggaaagtcatgccgtcaacgcgcacggtaaccacacgtcctttggcgatttccttagcctgaattgcgccgcccatatccatctgcgacattaaccagccgccgaaaatatcgccgtttgcattggtgtctgcaggcatagccaatgtgcgtaacaccatttcgccattgggtaacttatgtttatcgttcatatcgatgggcttcacattgagaaatctaaagtttaagtccctaaccgaagaggaaagggacctacggcaggtttacgtctatttttttcttctttttcttcttcaggcatatgtctgaagatatatatgccgcttaacagcgtgaataccagggtcagaacggtaagtccgaatactttgaagttaacccacacgttttctggcaaccagaaggcgacgtaaatattcgccagaccgcagagcaggaagaaaatagcccatgcgacgttcagcttgccccaaaccgcatcgggcaacgtcagctctttacccagcatccgctgaatcagcggtttcttcaaaaccaattggctaacgagcaatgcgcctgagaacagcacataaatcaccgtcactttccatttaatgaacaggtcatcatggaataccaacgttaacgtaccgaaaacggcgaccataacaaaggtaataagtgtcattttttccactttgcggtatttgatccaggtaataatcaaagccagcgcagtggcggcaatcagagcacccgatgccacatagatgtcgtaaagcttataaaaaacaaagaatacaatcaggggaagaaaatcaaggagctgcttcatacttcattccatattttaggtaagccctgactataccggatccttttctgccttcaaaatgcggcccgtttttcatcccgtacagtagagcattgtcgaatttggtgactttgccacagttgttattcaaatgaggcgtttgttttcagttcgttacattatcctgagcgaaatcgggttttttattcgctgaagacgaaataaaggggcgtttttcgccccttttgactctttcgacaatctgtctcgcctggcgtcaggcgcgcagtttggtgtaaaggcggaacagataaatcagcagataggccgaaatgaggttgctcaccgcgctgagcactacggtagctacttcaggacccaagaacttcaaatggctgacggccagtaataccagcatttttgctgccaaccacagcatgatggcaggaacaatcaggcggctgttggcaaaggccagtttggcgctcaatttaatcgacttgaaaacgcctaccttctccgtcgccacaataatcggcgcgaatgaaactgcgaccgcaataatcagaccggggacgatgaaaagcgtcaagccaagctgcacaatcagcgtacacaggaacatcagcagcagcacgcgcggcagcataggggctgaggcaccgatagagcgcagcgcgctggtgcgcacgcctgacgaaacctgctggatgagcgtcatcagaccgccaaccaacagcacgttaccgaccaatgccgagaaggtggctgcagcagacacttttagcagcaccatctgttgctcagggtcatctgctgaatgatttcctgaatgctcatccctgccgtgtcggagagcgagtcgctaccgctggtgagcaggctgagttgatcgctgtccggtgtaaaagcgtgattcaaaatgacggtaataaatgcggtcaacagcgccagcagcaagatgctgccgagttgattacgcaaaaaattgaaactgtcacggtacaacgaactggccgtgataggcatgaaggctcctaagggtatctataatttttccgaaccgcgattgtaccttgtaatggtcttgctggcaccccggcaatcgcttgagtgacgcttcttacgaactcttacttttgctggtttaatgtacgcgcatttttttcaggaatttgggattaaaaagcggatttataaggattaaattggaagacaattaattcgaaaataaattcactttcaagataaataaatgaaaattcgctctttttgcgtaaagagtcttgattgttttttttagcaaaactaggatgcaatgagtttatctaccttagcagcgaatatgaaaattcttttgattagacgtgacaatattggcgatcttattttaacaacgccgctgattgccacgcttgcagggcaaaaaacgaacaagcttgatttgctggttaatacctataataaagatgttctggaggggaacccgcacatcggtaaagtccacctctactgcaaatcacatcaccgtaaactcgggcaaaccttgcttggagtctatctcgctcgactaaaaaccatcttttcggtgcgttttgcacgttatgacgtggccatcgtgggcagttccgacaagcgggcgctaaaatgggccaaaatgtcgggcgcgaagcgcattattgccatcggcgatcactggcctgactgcgtgacggataaaattccttcagtgaaaggacagcatattgttgaatcactgaataagctgtctcaacctctaggtattgaccaactaccggggccgctcgaactctacgtctccgagcctgaaattgccaagatggcagaaaagtatggcattaaacgtgataagccggtctatggcgtgcaaattagcgcgcgtaaacctcagcaacgttggcaggtcgagaagtttatcgagttcacccgccgactgtcggcgcgtgaagactgccagatagtgttgttctggtctccgggcgcagaggacaaccctgagcatcctggcgatgatagcaaagcgcagcggattattgatgcttgcgcagacatcaacctgattgcactgccaacgcgcagcattcgtgagttaatggcggcgatgtcgctttgcgaccaaataatcaccagcgacggtggcgcactgcatattgctgctggcgtacaaaaacctgtggtagcgatgttcggtaacagcgacgctgtctactgggggccgtggaaggtgccgtgtgcggttatcaatgcgccgtctgaggacgtcggtctgttagacgttgacagcgtttatagccacttcaccgcgctgcgcgcgagggtgctagcgcctgctgaagagcgtgtactgctcaccgcctgaagcgattatcgcatctcattaaaacgccggaaatttccggcgttttttttgtcatctctttctgacctctgactaaacggcaagtgtcgccagcgagacggcctgcattaatggcggtaaaccatagcgtgcacgtgcgcgatcgcaggcttcgttggcaacgtcgttcagaccagactggtcaaactcacggcaaggcgttggacggttcagatagatggaacaggaaaccgatttgccaatttcaccgtcaagcgccacacatcgcggcgacttgggaacattggtgccttgcatacagctcaggaaaggggtgacttgctctgttaacgcttgcggaacgacgccgcctgcctcttcagattcagcccagtaaaaagatacacggaaataggcgcaacatgcgccgcaggacacgcagggattatcaatatcgctcatcttggaagctaccgaaaacggaaacgtaaaaccaaaaacaaactgtgagaaagcaaattacgcgctcccgattttttccacaactgatatttcattgccagtcgtaaagattaaaaaaagcattttttgatccagatcaatgcctttgttattagtaagttagaatcaatttaacaatgtgcatttacatcagttttcatataaaaacctgacctcgatacggctaaaactttgcggagtatggctaaatacccgtaaataaccacaacgagggaatggataatgaaagcagcacattgggcactgctcgccgcagccgttttgccaacggtagccagtgccaatcaggccggggatgtaattgttcgcgtcggtaccgcaacggtaagaccttcggcaaattcgccgagcgtactgggttcgctgggatcgtttaatgccagcaacaacacccagatgggcctgactttaggttacatgtggactgataacatcggtaccgaactgctggccgcaacccctttcaggcataaaatcggcctcaatggaatgggcgatatcgccaccgtgcgtcaactgccgccaacgctgatggcgcagtattattttggtgataaagaagacacactgcgtccgtatgtcggcgtcggcgttaactacaccaccttctatcatgcgcgctttaacgaaaccggctccaatgccggactgtctgacctgagcatgaaacattcgtggggttgggcgggtcaggcggggtcgactacaacatcaatcgcaactggctgctgaatgcctcggtctggtggatggacatcgacaccaccgcacgcttcaaggcgggtggcgagcaacagtcggtgagtacgcagctcaatccatgggtgttcatgttcgccgtgggttacaagttctaagcacgatttttagcacggcctcggcaagctaaaacagaaaaggcgtctaaagagacgcctttcgtcttactgtattaacgcattatttaatttgggtatcgttctcaacggaacgcacgccagcaacgccctccgtcacgacaacggctctttgagcttcagacgcagaggtgacaaatccgctcagctgaacgcgacccttgaaggtctcaacgctgatttcacgcgacttgatgtttttatcggccagcagggctgatttaaccttggtggttaccacggtgtcatcgatatatccgccggtgccttcctgttttgccgtaggtgcacaggctgccaatgcggtgaccacgacggctgccatgcaaattgctgaaagactttttaatagcttcataattttactctccatgcatgtgttatcagaaactaataaactcaccgtaataaatacgcgcgatttttcttataaaccgacaagtacctgattaagcataataaacaatcagtcaaataagtgtggttgaaaagtgcgggatagacaatttcagcaggtaaaaaagttaaaaactttgaaaaaaataaagccccgatcacagcatgaacggggctttttaacgctaatgcttgtgcttagcggcgggtggcggccttcatctctgagacgaagcgggacagctgagcgagcatctcggcaggattatcctgattgttttcgatgatgcgcacggtcgctgagcctgaaatagctcctgccgcaccggcagccagcgtctctttcacctgtgaaggttcggaaataccgaaaccctgtagtggcggtgccgcattgtattcacgcagcttgtctaccagatgattgagaggcgtaattgcgcgcttctccgtgccggttacgccagcgcgggaaagcagataggtatatccacggccgtgtgaggcaatctcacgcagcaggttatcgctcgcattgggtgggcagatgaagataggtgccacgccgtgacgcatcgcagcggctcggaacggcgcagactcttcaagcggcacgtctgcgaccagcacagagtccacgcctgccttggcgcatttggcataaaactcgtcgatgccgttatggaacaccaggttggcgtacatcagcaggcccatcggaatatccgcatgcttttcgcgaattttagccagcatgtcaaagcaaatcgtaggcgttacgcccgacgcgaaagcgcgcaggttggcattctgaatggtcgggccgtcggccagcgggtcagagaacggaatccccagctccagcgcgtcggcaccggcttcaatcaaggtatcgacaatcgccagagacagttcgggattcgggtcacccagcgtcacgaagggaacaaacgcgccttcgttttggctttctaaacgcttgaaaagttgttgatagcgttccatcagatttctccccgggcagtcaggatgtcgtgaacggtaaagatgtctttatcaccgcggccagaaaggctcaccaccaggatctgttctttctgcgggtcttgtttaatcagtttcaatgcataagccagcgcgtgagaagactcaagcgcaggaataatcccttcgtggcgcgacagcgccttgaaggcctccagcgcttcgtcgtcggtaatcgacacatattcggcgcggccaatgctgttgagataggcgtgctgcggtccaacggacgggaagtccagaccggcagaaatggagtaagattcctcaatctggccttcatcggtttgcatcatcggggctttcataccgaagtagatgccgaccggcgcatgcttgagtggtgcaccgtggtggccggtttcaatacccagccccgcaggctcgacgccaatcagcttcacggcggtgtcgtcaataaagtcggcaaacataccgatagcgttggaacctccgcccacacaggcaataacggcgtcaggcagacaaccttcgcgctcctgcatctgcgccttggtttcttcactgatcatgcgctggaattcacgcacgatagtggggtaagggtgcgggcctgcggcggtgcccagcatgtagtgtgatttctcatagctgccagaccagtcgcgcagtgcctcgttgcacgcatctttcaacgttgcggagccgctgtgcacagggatgacttcggcacccatcaaacgcatacggaacacgttcggagactgacgttcgacgtctttagcgcccatatagatgcggcatttcaggccaagcagggcgcaggccagtgcggacgctacgccgtgttgaccggcaccggtttcggcgataatttcggttttgcccatgcgttttgccagcagggcctgacccagcacctggttggttttatgcgcgccgccgtgcagcaggtcttcgcgcttcagatacagcgtggtattagtaccttcggtcaggtttttgcacagcgtcaatgcggtcggacggccagcatagttcttcagcaggtcgataaattctgcctgaaactcggggtcgcgctgtgcgttaacaaaggcttcttccagttggataagcgctggcatcagaatttgcggcacatacatgccgccaaattcgccgaagtagggattaagtaaagtcatgttgtctcttcctataacactcatttagtaagcgcgtagcgtctggaatacggcagtaattttgtccgcatctttgatgccaggttcgctttcaacacctgaattgaaatccagtccggcgcagccaagttgggctgcctctacgcagttgtccgcgcccaggccaccggccagcagcacgttatcgagcttttcacccgccagcttgctccagtcaaaacgctggccggtgccgcctttgccgttgtcgagcacgtagcgttcaacgtgttcgaggttgcgggccggaatagaatctttgacgctcagcgctttccagatttgacaattgtgcggcagaatttcacgcagatgattgatgtaagtctgatcttcatcaccgtgcagctgtacggcaaacagattcagcgtcttggctttctctgccacctcggctttctccgcatcgcggaacacacccacgtatttcagcggcgcgccgctctgcacttgtcgagcctgcgcactgtctacaaagcgcggagaggctgcaacgaaaatcagtccaccgtagatggcaccggcctgataggcgacgttggcgtcctgggggcgagtcagtccacagactttattttcgccgagcagcacgcggcgtaccgcgctgttcaggtttgcttcggacatcagcgcgctgccaatcaggaagccattggcgaaacggcttaactcacgaatttgcgcgtagtcgttgatgccagactcactgatcaccgtcacgccgtgcggcacgcggggtgccagctcgcgggtacggttcaaatcgatagacaggtcgcgcaggtcgcggttgttgatgccaacgaccttggccttcagctgcaccgcgcgttcaagttcttcttcattactcgcttcggtcagaacacccatgttcaggctgtgggccacggcggcgagctggacatattgctcgtcgtccagaaccgacagcatcagcaggatggcatctgcctgatagaaacgcgccagatggatctgataagggtcgatgataaagtctttgcacagcaccggctgagtcacttcggcgctcaccagcggcagaaaatcaaagctgccctgaaagtatttctcgtcggtcaggacagaaatggcggaggcgaaattcttgtaaacgcctgcaatttcaaccggatcaaaattattgcggagggtgcctttcgacggagaggcttttttgcattcaagaataaaagcggttctggcaccctgtagcgcgtgatagaagctgcgctggcttggtttgatttcgttctgaaaactggccaggggttgctgttctttacgtgccgcgacccaaacttctttatcgcggacaatcttgtggagcacggtttcctgctgcatcacttatcctcttgctgccaatgcggtaacgcgtcggaagggttccccgctgcgcattactgccaaagctttttgtgcgttttgttttaaatcttcctgcccgaaaagtcgcaataacatggcgacattggcggccacggccgcctcgtgggcagggtcacctttaccttgtaacaagcgtgccagaatgtcacggttttcttctggctcgccgccgagcagggcggttatcggataattttccaaaccaaagtcctgtggcgtcagttcataggtctcgatttcaccgttttttagttcggcaacctgagtcggtgcgtggatggctacctcatccatgccgccaccgtgtaccacggctgcacgctcatagcccagcgtgcgcagtgtttcggcgatcgggcggaccagctctgggctgtagacgccaatcagcgccagaggcggtctggccgggttaatcaatgggcccaaaacgttaaacagcgtgcgggtcttcagcgccttacggaccggcatcgcgtggcgaaaaccggtgtgatactgcggcgcgaacaggaagcacacgccaaggtcgtccagcgccgcgcgggactcggcggcgggcatatcaagacgaataccgaacgccgccagcagatcggaagaacccgagcgacttgagacgctgcggttgccgtgcttggcgacgcgagcgccgcaggcagcggcgacgaaggcgctggcggtcgagatattaatgctgttagtgccgtcaccgccggttccgacgatatcggcaaacgcatagtctggacgcggaaatggctcggcatcggccagtaacgcctgggcggccccggcgatttcagccggctgctcgccgcgcactttcatgctgatcagtgcagcggccagctgcgcaggctcgagctcgcccttaacaatggcgctgaacaacgtttggctctcttcctgagtcatcggctgtgcctggtaaaggttttccagaatacctgcaattttttgcgtttccatgacgactccttgttacgccaaagcccaggccaatgtctgttccagcagacgggcgccctgagaagttaaaatagattccgggtggaattggaagccgcacacgcggtcttcttcatggcgaacggccatcaccatgtcaccgaagcgggcgttgaccgtcagcccatcgggaatttggctcccgaccaatgagtgatagcgcgctactggcagcgggttgttcatgcctgcaaacatcccttcattgtcgtgagtaattgaagaggctttaccgtgcaggatttcgcctgcttgcccaacgtgaccgccgtaggtttcaacaatcgcctgatggccaaggcagatgccgataatcggcaactgaccgcgcagacggcgcagcagttcaggcatgcagcccgcctctgatggcgaaccaggacccggtgacagcagcagaacaggcttttccaactgactaagcttttcgatgatgatctcggccggaatatggttacggtaaatcaccacgttgtggccgcttgagcgcagctggtctaccaggttgtaggtaaaggagtctacgttgtcgagaagtaaaatatcggccatcttaaaacacctctttaacatgatgagctgtggcgatggcacgcagcacggcacgggctttattacgggtttcgtcggcttctgcctgcggaacggagtcgagcacgacgccgccgcctgcctgtacggtggcaacgccgtcttcaacgtaggcagaacgaatgacgatacaggtatcaaggtcgccgtgagcggtgaagtagcccaccgcgccgccgtagctgccgcggcgagtgccttcagactctgcaatcagctgcatggcgcgtacttttggtgcaccggtcaacgtgcccatattcattaccgcctgataggcgtgcagtacgtcgagatcggcacgcagtgtgccgacaacgcgagagaccagatgcatcacgacggagtaacggtcaaccttggtcaggtcggcgacgtagcggctgcctggttcacagatgcgcgccagatcgttgcgtgccaggtcaactagcatcaggtgttcggccaactctttgtggtcggtacgcatttccagctcgatacggctgtcgaggtctgcatcaagcgaaccatcggcacggcggccacgaggacgggtgcctgcaatcggataaatttcaatctgacggttggtcgcgtcatatttcagcgcgctctcaggagacgcaccgaacagggtgaaatcgttgtcctgcatgaagaacatataaggacttgggttgctgtttttcagcgtttcataggctgccagcggtgcagggcaaggcagtgagaagcggcgtgaaggcacaacctggaagatttcaccggcacgaatcgcctctttcatctgctcgaccacgccaccgaacacttcatcgctctgattgcagctgagctgcatgtcgttcacggtctggtgcggaatagtgtgtggcggctgttgcagttgatgttgcagctgctcaagacgttcggtcaggcgctgtttctcttcctggtcaggcgtaaacaggctggcctgcaaacggctagtgcgcttctgatggtcgagaaccagcagggtttcggccaaatagaagcagaagtccggacagcgctgatcggcacgaagctgcggaagatcttcgaaaccggccaccagatcgtaggcgaagaggccaccgaggaacatcgcctcgcgctcatcttccggtgactccaccaaattgagcacgttgcgcagtgcgtcgaacactgactgagaacgcaggcgggcatcttcatcctgaagagtgtcgatgaccgggaaggtcagctcgcgaccgtttggacgcgccacgttctgcacatcggcaggcagagacgcatcgagcagcggcagcagggatgcaccgttggtcgtcagcgcctggatattgacgacgcgacccagtgcggtgatgcgcagcgcgctgtcgacgataagcaggctcttcaggctctgcttggtattgatttccgcactctcgagcagcagcgttgcagggcgagcgccgcacagctggtggaaaattgccgtaggatcgccacggtgacttccttgtgatgtcagtaattctaatttatatcgttgattactcatgatttttcctaaaatttatccacaaaaaaacccgcaatgagcgggcttcgggtatctgcagcgtctgatgacagctatgcgcgattacaccgcccgcgttggggaggcgcgccaccagctgttagaagaagtcatgttggttttcatcatcagtcactctagtaagttgtgcttgcctgaattcggttgtcacagcgtgctgtgaacttgcgtactagttaactagttcattgatgtaaagtcaacctcctttttgacattctttaggcaaaaagggcgttgtgcgcaaatctggggcggagttgctcaaaaaccatgctgttcaggccaataatcgagatagcggtaactccacaaaggcatccgcgttatgatagggacagttttttataaccggtctttctgtaattattatgacatccagtttatccgacaatcccgcattcaccctttatgacctgcacagccacaccaccgcctcagacggctacctgacgcccgaagaactggtcaagcgtgcggtcgacatgcgcgtcggcgttttagctattaccgatcacgacagcaccgaagggctggctcgtgcagcggcggccatcgaggcgcacaatctgccgcttcaactgatcaacggcgttgaaatttccacgctatgggaaaatcacgagatccatattgttggtttgcgcatcgaccctgagcatccggcgatgattgcgttgcttgagaatcaggcgcggttgcgcgtcgagcgtgcacaagagataggtcgccggctggccaaggcacgcatcgaaggtgcatgggaaggcgcactacgccatgcacagggcggcgcggttacgcgagctcactttgcgcgttatctggttgaagtcggtgctgccgagaacatcgctaaggtgtttaaaaaatacctcgccaagggcaataccggttacgttccgccacagtggtgtacaataaaagaagctattgatgttattcatcaatctggtgggcaggcggtcgtggcacatccaggacgttacgacctgtcaaccaagtggttaaagcgcctgcttgcctactttgccgagcagggcggcgacgcgatggaagtcgcgcagtgtcagcaagcgcctcatgagcgagcgcagcacgccgctttttcccgagattatcatttattggcgtcgcaggggtctgatttccatcagccctgctcgtggattgagctgggccgcaagctttggttaccggccaacgtcgaggccgtctggaaagactggcccgtccttcgtccttgaggctgcaactgcattggctgtactctataaccgccttgttgcagctcaaatgacatgggattgatagcccggcgccttattaagtgaagaggatttgctatgagtcaatatttttacgttcaccctgagaacccgcagccgcgattggttaaccaggccgtcgacatgctgcgtaaaggctgcgtgattgtttatccgaccgactcaggctatgcgctgggctgccgtctggaagacaaggcgtctatggaacgcatttgccgtattcgtcaacttgacggcacgcacaactttacgctggtctgccgcgacttgtccgaactgtcaacctatgcctatgtcgacaacacggctttccggttgatcaaaaataataccccggcaattacacgttcattctcaaggcgaccaaagaagtgccacgccgtctgatgaacgacaagcgcaagactatcgggctgcgcgtaccctccaatccaattgcgctggcgttgcttgacgtgcttggagaaccgttgatgtcgaccaccctgatgctgccgggtaatgacttcgccgagtcggacccggaagagatcaaggacaacatcggcaagctggtggacctcattcttgacggcggttcgattggccagcagccaaccaccgttattgacctgacagactctgtgccagaagtggtacgcgaagggctggcgatcctgtaccgttccgctgagttatcgaagccaacgcaaagatgcgtgaaagttagccgatttgttagacaatcataagtacactcgactaataaatgtgtataatagtcggctgactttttactaatgctaagtcactgtattctagtgggtgggtgatgttattcatcgcgccatccgctcccccgacgcctgtgaaggcgacaaaagaggctgctcaatgagcgagaagtttaattccagtaagcaaaaaaacgaaaaatattcgtctgacaagccgcgttctcagcgcagcgagtcggataagccgcgcggcaaaaagccgggtgcggataaatcccgtattgaaaccgttcgtggtggcaagcctgccgcggataaatccggtgccgataaaggtcgaaccgataagccacgcggtgacaaaccacgtaacggtaaaccacagggcgacaaaccgcgcagcaataagccgcgtaacgagtccctggtggtgaaaaaagtcagtgatgacgaagcagaagaagcgccaaagtacgaaaagcctaaaaacgcacgtgacgatggcgatggcctgcagagcgaaaagctgcaaaaggtattagcccgtgcaggtcacggctctcgtcgtgaagttgaagcgatgattcaggctggccgcgtcagcgttgacggtaagatttccaccctcggcgatcgcgttgaactgaccgcaggcaccaaaatccgtctcgatggccacgtgctgtcgattcttgaagcggaagacactgtctgccgcgtgctggcgtactacaaaccagaaggcgaactctgtacccgcagtgatcctgaaggtcgtccgaccgtgttcgacaggctgccaaaaatgcgcggttcgcgctgggttgccgtgggtcgtcttgacgtcaacacttcaggtttactgctgttcaccaccgacggtgagctggctaaccgcctgatgcacccaagccgcgaagttgagcgcgaatacgctgtgcgcgtgtttggccagattgacgatgagaaaatcaaacagctgagccgtggcgtacagctggaagacggtcctgccgctttccgcaccatcaaatatcagggcggtgaaggcctgaatcagtggtacaacgtgactctgaccgaagggcgtaaccgcgaagtacgtcgtctgtgggaagccgttggcgtacaggttagccgtcttatccgcgttcgctacggcgatcttaacctgcctaaaggcctgcctcgcggcggctataaagagctggatctgccggacatcaactacctgcgtcagctggtagacatgaccgaagaaaccgtgagcaagatgccggttgagcgcgatcgccgccgcgtgaaggcgaatcagattcgccgtgcggtaaaacgccatactcaggttgctcctgctcgtcgcagcagcggtccaggcaagcgctgatcgacgtcagccaaaaaaaaccgcagccattgtgctgcggtttttttgtttcgataatcaggcccggtctaccagtcgataccctgttgggccatgatgcctgcgtcgaaggcgtgtttgacggggcgtagttcgctcacggtatcggccagttcaagcaggtcgcgatggcatccacggccggtgatgataaccgtctggtgggcagggcgtgcatttagcgcatcaatgacttcttgtaaatccagatagccaaaactcagcatgtaggtcagttcgtcaagcacgactaaatcaagcgagctatcggccagcatgcgtttaccgtgctgccagacggcctgacacgccagcgtgtccgtctctttattctgagtttcccaggtaaaaccggtggccatcacctgaaattcgacgccgtgcggctcaagcagatttcgctcgccgttcggccattcacctttgataaactggatgacacccgcgcgcaacccatggcctacggcgcgggtaacggtcccgaaagcgccggtcgttttacctttgccgttccccgtcagcacgataagaatgccgcgcgtttcttttgccgcctcaatacgtgcatcgacctgttctttaagcttttgttgtcgctgctggtgtctgtctgcgctcattgttttcgcctgaattattccgcagggccggctttacggccgggctgtgcgtcgaaactggtgccggttttccggcggctgtcgtcacccatcagatacaagtaaagtggcatgatatcggcaggtgttttcagtttttggctgttttcatccgggaatgcagatgcccgcatactggtgcgtgttccgcccggattgatgcagttaacccgcaggttggtatgtttgtactcgtctgctagcacctgcataagccctcggtagcgaacttggagacggaataggcgccccaaccgctgcggccttcgcggcccacgcttgagctggtaaagaccagcgatgagctggcagatttcaataatagaggcaacaggctctgggtcagcataaaggctgcgttgacgtttacctgcatcacgtcgtgccagtcttgcagtttgatgtcgctgaccggaacaatttcactcaacaaaccggcgttgtgcagcacgccgtcgaggcggggaacccattctgcgatacggtcggccacgcgctggcagtcttcctgcgaagcatgcagcaggtcgagcgtgaggtactcggcagggtgccaaccctgttgggcaatctcttgctgaacgctaaccagtttgctttcggtacggccaagcaaaataacctgcgcaccgaagcgggcgtaggtgagtgcggcttcacggccgataccatcgcctgcaccggtaaccagaataatacgttggcgaagcaggtcggatttaggatgataatgcactgaatttgtcctcaaagtggcgtcaggatgcggtggcagaggccatcaacgcatcgaaccaactcgtttgccgggagcaataacctcaaccgtgaccaaacgaattgacagaatagattttgaaaatgggtgaataattgcagttatatgccttaaatggacatgactttcaatgattaacccaagattgcgcagatcatttgtaacaaaaatgaactccagccgcaccatgtttagaaaatttaacgcattattgggataaaagcggtgtctctttgtttcgagcacggtttggcacaagactcatcgacggcgattgtctagaatgggcgtcgtatcttatcagaatgtgaaaaggcggtatctgtggatttactttctctgtatgggctgtttttagccaagatagtcaccgtcgtggtggccattggcgcactgattgtgctggtcattgggctgcgtcaccgtaaatcgtcgggtaagggggagctacgcctgaccgacctgggtgaagaatatcgcgaaatgcagcgcgaaatgcgcaccgcccgcctgagtccggcagaacaaaaacttagccttaaagcgtttaaaaagcaggaaaaagccgacgctaaagcgaaaaagcagcaggcaaaaaccggtactacgtccagcaaaccctgtttgtatgtccttgattttaaaggcagcatggacgcgcatgaagtcacctctctgcgtgaagagatctcggcggtactggcggtggcaactccacaggatgaagtcttattgcgcctcgaaagtccgggcggcgtggtgcacggttatggtctggcggcatctcagcttgttcgtctgcgtcaggcggggattcgcctgaccgttgcggtcgacaaagtcgcagccagcggcggttacatgatggcctgcgtcgctgaccgtatcgtggcagcaccgttcgccatcattggctcgattggcgtcgtggcacagatccctaacttcagccgtttgctgaagaaaaacgatatcgacgttgagctacacactgccggtcaatataagcgcaccttaacgctgtttggtgaaaacaccgatgaagggcgtgaaaagttccgcgaagatttaaacgaaacgcacgtgttgtttaaagagttcgtgcacgagaatcgtccctctctggacatcgattctgtggcaaccggtgagcactggttcggtacgcaggctcgtgaaaaaggcctgattgacgcggtgggtaccagcgacgatctgctgattgccgaaatgcagaaccacgaggttatctcagtacgttacgcacgtcgtaaacgtatgatggacaggttcaccggcagtgcagcagagagcgccgatcgtctatttttacgctggttgcagcgaagcgaaaagccgctgttgtaaattttctaaaagggacttcggtcccttttttaatctcaaaaaattcgtttttctattaactcacggtctaactctttttaattaataaccgcatcttttcgcctaaaaaagaaactattttaccaggtggtatttatctgaaaaaagatgggccaaatgtttaaacatattaaacactgcgggggttttagcggtcggtaatccttgttcgtcgaggaagaattctccgcgaaaaaccaacacatcgcctttttgttcgacttctgttgctatcattcccggtagataatgttcatgctggcggattgctttatttgcttctataagtagtgcttcagaagttattgccgctgtgctcgtgtgcataaaaagtgttccccactataatcattggcgtaattgtaatcccgcagcggacaagaccgcaatcggtgtgtggacatcttcactcagcgttgaacatataatgttcagcttggcagaaagcgcatttacgtgctaattaggttgcgtggcaaattttatcaggtagagtgtgggattttctggcatcgggtggaatgatttgtttacgctcgaaggttgttttagaccatgattgcggtttccttaccatcgttcgggctcttaactcattaaaattcatgagattgcccctctggaggacgattggataggctgagagaaaaaaatagttgatctcctgactcactgccgcaatataaaaaaagacattaaatgtgccgcggcataaacaagacaaaatcttctttccgagaagaataatttaggtaaaaggtaattatgggcaaagctctcgtaatagttgagtccccggcaaaagccaaaacgattaataaatatttaggaaatgactacgtggttaagtccagcgtgggtcatatccgcgatttaccaaccagtggctctgcgagtaaaaaaagcgctgactcaaccgaagaaaaaacaaagaaaaaagtaaaaaaggatgagaaaaccgcgctggttaatcgtatgggcgtcgatccgtatcacggatgggctgcgcagtatgaaatattgccaggtaaagaaaaggttgtcgctgagttaaaatctctcgcagaaaaagccgaccacatctatctcgcaaccgaccttgaccgcgaaggggaagccattgcatggcacctgcgggaagtgattgggggtgacgataaacgctttagccgcgttgtttttaatgaaataaccaagaatgccattcaacaggcattcgaacagccgggtgagctaaatattgcccgcgttaatgcccagcaggcgcgtcgtttcatggaccgcgttgtgggttacatggtttctccgctgctgtggaaaaagattgcccgtgggctctcggctgggcgcgttcagtccgttgccgtacgtctggtggtcgaacgtgaaaaagagatcaaagcctttgttcccgaagagtattgggagctgcacgccgatctgcagtcgaaagagaatatcgctctgcagatggaggtgacgcatcacctcgagaaagcgtttaagccggttaaccgtgagcagactcacgccgccgtcgcactgctcgaaaaagcgcgctacgacgtcgttgaccgcgaagataaaccgaccagcagtaagccgggtgcaccttttattacttctacgctgcaacaggcggcgagcacccgtctgagctttggcgtgaagaaaaccatgatgatggcccagcgtctgtatgaagccggtcatattacctacatgcgtaccgactccaccaacctgagtcaggatgcagtagaaatggtgcgcggctacatcaacgataatttcggtgagaaatacctgccgaaaactgctaaccaatacagcaacaaagaaaattctcaggaagcacacgaagcgattcgtccttccgacgtcaacgtggtttccgagcagttgaaagacatggaagcggacgcccagcgtttgtatcagctgatctggcgtcagttcgtcgcctgtcagatggtgccagcacagtatgactccaccacgctgaccgtgaaagccggcgactattcgctgcgtgctaaaggtcgtaccttgcgctttgacggctggacccacgtgatgcctgcgctacgcaagggcgatgaagaccgcacgctgccgcctatcgaagtcggaagtacgcttgagctgcaacagctgctgccaacgcaacacttcaccaagccgccagcgcgtttcagcgaagcgtcgctggttaaagagttagaaaaacgcggtattggccgtccgtccacctatgcgtcgatcatttcgaccattcaggacaggggctatgtgcacgtcgagaatcgccgtttctatgccgagaaaatgggtgagatagttaccgatcgtctggaagataacttccgcgaactgatgaactatgacttcaccgcgcgcatggaagacggtcttgatgaggtcgccaacaataaggccgagtggaaaggcgtactggatgacttcttcacccagttcagccagcagcttgaaatcgccgaaaaagatccggaagagggcggaatgcgcccgaaccagatggtgatgaccagcatcgactgcccgacctgtggccgtccgatgggcatccgtaccgcgaccactggcgtgttcctcggctgttccggctatgcgttgccgccgaaagagcgctgtaagaccaccattaacctggtgccggaatctgaagttctcaacgttctcgaaggggacgacgctgaaaccaacgccctgcgcgcccgccgccgctgcaccaagtgtggtactgcgatggacagctacctgattgataccaatcgcaagctgcacgtctgcggtaacaaccggcctgcgatggttacgaaatcgaagaaggcgagttccgcatcaagggttacgacggtccggttgtcgagtgcgacaagtgtggttccgaaatgcacctgaaaatgggccgtttcggtaaatacatgggctgtaccaacgagacctgtaagaacactcgcaagatcctgcgtaacggtgatgttgcaccgccgaaggaagatccggtgcctctgccagaactgccttgtgaaaaatccgatgcgtatttcgttctgcgtgacggtgctgccggcgtgttcctggcggccaataccttccctaaatcgcgcgaaacgcgtgcgcctttagtcgaagagttgctgcgcttcaaagaccgtttgcctgaaaaactgagctacctggccgatgcgccggtcgccgacccagaaggtaataagtcgatggtgcgcttcagccggaagactaagcagcaatacgtgtcttctgagaaagacggtaaagcgacaggctggacggcgttcttcgttgacggcaagtgggtggaaggcaaaaagtaagtcttaacggctttctgacctgcgaatcataaaaaccagccttaatggctggtttttttattgtaataaggccaatcaccgttagactttattgccgaagcggcattgcactcagcatcataaagaaatcttgagttttttataatcaggtgcgagacaaaatcaattgataaatgatattgttgttatataaaatactgtttttatgcattattagaatgagttggcttacacacaacagaacacccctttcttgctgtcggcgggctggcgcgcaaaattttgaccagtaatacgttcgtcagcaatgaccacgggagctttcgggcagggtttaacactaggatggtataagatatgaaattgcagcaactgcgttacatcgtagaagttgttaatcacaatctgaacgtctcttcgacggcagaaggcctctacacctcacagccaggcatcagcaagcaagtgcgcatgctggaagatgaactcgggatccagatttttgcccgcagcggtaaacatctcactcaggttacgcctgcggggcaggaaattatccgtatcgcccgcgaagtgctgtcgaaagttgatgcgattaaagccgtagctggagagcatacctatcctgataaggggtcgctttatgttgccacgacgcatactcaggcgcgctacgccttgcctaacgttatcaagggctttattgaacgctatccgcgagtttctttgcacatgcatcaagggtcacccacgcaaatagccgaggcggtatcgaaggggaatgctgattttgccatcgcaaccgaagcgctgcacctttacgatgacctgatcatgctgccttgctatcactggaaccgtgcggtagtagttcaaccggatcacccattggcgggcaaagaaaaagtcagcattgaagagctggcgtcctatcctatcgtgacttataccttcggatttaccggacgttcagagctggatacggcgttcaaccgtgccggattaacccctcgcatcgtctttaccgcgaccgacgccgacgttatcaagacttacgtgcgtttagggctaggggtcggcgttatcgccagcatggcggtcgatccggtacaggatccagacctggtgaccgtcgatgccagcgatatcttcacccatagcaccaccaaaatcggctttcgtcgcagcaccttcctgcgcagctacatgtacgattttatccagcgtttcgcgccgcacctcacgcgtgacgtggtcgacagtgccatcgcactgcgctcgaacgaggatattgaagcgctgtttaaagacatcaaactgccgcacaagtaatcctgcttccttaacccaggccgccgagagtgtggcctgggtcgttttacgcctgtcctaacgcctttctcaccgccgcaaatcacccaatgtctatacgccaagttcaaacatctcatcatccgtctggtaggtgtctcaaggtctacgccatggcacgactctctcaagcgtggaaagggataacaaggcgagggatttgatggacttattcagtttgatagggggaacgggcggggggtttggcacagcaggttgccacttcggaaattagcctttcgtgttgttatcaaaatgttaatgataatttgtgttatctttattagagcacttactgtctgacgggtctttctcatcagctgaactagaatgtttatgccataaacaaaaaaagcgcgttaaaaggagaagctatgtcgtccgatcttcgcaagaatagtcaggataagctggcaaacctcgataaggaatatcacttttacagcttacccaaagccgccgccacactaggcaatatcgaccgattgcctaagtctatgaaagttttgctcgaaaatctgctgcgtaacgttgacggcgataccgtcaccgaagacgatctgcaggcgattgtcgactggcaaaaaacgggccacgccgacagggaaattgcctatcgcccggcccgtgtcctgatgcaggacttcactgggtccccgccgttgttgacctggccgctatgcgcgaggccgttgagcgcctgggcggcaacgtcaatcaggttaatcctttgtctccagttgatctggtgattgaccactccgttaccgtggatgagttcggcgaccgtgccgccttcggcgagaacgtcaaactggaaatggagcgtaatcacgagcgctatatcttcctgcgctgggccaaaaagcctttaaccgtttccgcgtcgtgccgccgggtaccgggatttgccaccaggttaacctcgaatatctcggccagaccgtatggcatgaacagcaggacggccgtgaagtggcctatcctgatacgctggtcggcaccgactcccataccaccatgataaacggcctcggcgttttgggttggggctgcgggggatcgaggccgaagcggcgatgctcggacaaccggtatcgatgcttatccctgacgtcgtcggatttaaactgaccggcaagctgggtgaggggatcacggcgaccgatctggtattgaccgtgacgcagatgctgcgtaaacacggcgtggtcggtaagttcgtcgaattttacggtgacggtctggcggatctgccgctggccgatcgtgcgaccatcgccaatatgtccccagaatttggtgctacctgcggcttcttcccggtggatgaagttacgttgagctacatgaaactcagcggacgcagcgacgaacagattgcgctggtacaggcgtacagcaaggcgcaggggttgtggcgcgaaaaaggcgatgagcctatttttaccagcacgctccatctcgatatggcgcaggtcgagtccagtctggcagggccaaaacgtcctcaggaccgcgtcgcgctgccgaatgtgccgcaggcgtttaaggccgcaaccgaactcgaatttagcaacagcaaaacccagcaccgcgacagcgtggattttagctataaaaaccagtcgctacagctgaagaccggtgccgtcgtgatagcggctatcacctcctgcaccaacacctccaacccgagcgtgttgatggccgcgggcctgctggccaagaacgccgtcgccaaagggctgaaaagtaaaccttgggtgaaaacgtcattggcaccgggttctaaagtggtgaccgattatcttaaagccgcaggcctgatgcctgagctggaaaaactgggctttaatctggtgggttacgggtgtaccacctgtatcggtaactcgggtccgctgccagaccctatcgaagctgcaataaagcaggctgatttgaccgtcggtgccgtgctttcgggcaaccgtaacttcgagggtcgtattcatccgctcattaaaaccaactggcttgcgtcacccccgctggtggtggcctatgcgctggcgggcaatatgtcggtcgacttgacccatgattcgctgggtgaagacagccacggcaatccggtttatctgcgtgacatctggccatcatcgaatgaaattgccaaggccgttgagcaggttacgacggagatgttccataaagagtatgccgaagtgtttaatggtgacaaggactggcagaacatccaggtcgaaggcacgccgacctatgcctggcaggaagattcgacctacattcgtcatccgccgttcttcagcaccatgaaggctgaacctgatcccgttcaggatatcaaggatgcccgtattctggcgattctggctgactcggtgaccaccgaccacatttctccggccggtaacatcaaactcgagagtccggcaggccgctacctcagcgagcatggcgttaaacccggtgacttcaactcctacggttcgcgccgtggtaaccatgaagtcatgatgcgcggtacgttcgccaatattcgtattcgtaacgaaatggtgcccggtgtcgaaggcggcgtgacgcgacacattccttccggtgaccaactggcgatttacgacgcggcgatgcgttatgaaaaagagggcgtgccgctggcggtgatcgcgggcaaagagtatggttccggctccagccgtgactgggcagcgaaagggccaagactgctcggcgtacgcgtggtgattgctgaatccttcgaacgtattcaccgttcaaacctgatagggatggggatcctgccgctggagttcccacagggcgtgacgcgcaaaacgctgaacctcaagggcgatgaaaccattagcgtaagcggtatgcagtcgctcaagccgggtcaggacgtgccggtgcatattacctacgccgacggtaaaaaagaggtgattaacgcacgcagccgtatcgataccggcaacgagttaacctacttcgagaacggcggcatcctgcattatgttatccgtaaaatgctctgatagcggtcattcaggcataaaaaaagcaccgaatcttcggtgcttttttgttggacacagtaaacattacttgtccaaaagatggcccattttcgcggccttggtcgccagatagtgttcgttcttcgggttgcgaccgacgattaacggcacacgttcgacgatgttgatcccggcctcggtcagaatttcgacctttttcgggttgttggtcaacaggcgaacggcatcaactccgagcagcttgaacatatctgcgcacagggtgaagtcgcgttcatctgctgcaaagccgagctggtggttggcttcgacggtgtcgtagcctttatcctgcagggcatacgcgcgaattttattcagcaggccgatgttgcgcccttcctggcggtgatacatcagaataccgcgcccctcttcggcgatgtgattcaacgctgcctcgagttggaagccgcagtcacagcgcaggctgaacagggcatcgcccgtcagacattcggaatgcactcgtgcgagcaccggcgtatcgccgttaatgtccccgaaaaccagcgccaggtgatcgtgtccggttgccaattcttcaaaacccaccatcaggaaatcgccccaaggtgttggcagtttggcttctgccacccgtttcagctgcatgttactctccaaaacctgcaaatattcttaattcttgtggcgcatcctacgtagagatgaacgggttgaccagaaaaaatcagccgcgccccgaacatagccttactcacaagtatatcattcccggctggactgcgttgcaggccgctgcgtagaatgcgcattatacatttcattttcatgaatctttagatattagggccatacaatgtttcaaatcgctataaggaccaccggtgcagctctgcttctattactgatgcccgtactagtgtggatgagcggttggcagtgggccccaggtatgagtgacctcatcttacgccccttttacaggataacagagacggttagtgcgccgtggggcacattgaccaacattttgctctgcgtttggtttctgtggtgtttacgctaccgcattaagccggcgattgttttgattgtgctgctgagcgcggcggtgcttatcgggcaggggatcaagacctacgttaagcagcaagtgcaggaaccgcgcccttacgtgcagtggctgggtaaaacacaggacatggacgtgactgccttctaccagcagaaaagcaaagcccgcggccagcaggtaaagcaggaattagaaaataacgcgcaaatcccgcgctggctggccaaaagttggcaggcggacaccggcttctcgttcccctcgggacatacgatgtttgccgccagttgggcgctgcttggtgtgggtctgctgtggccacgtcgtcattataagaccgttgcggtgctgatggtgtgggccgcgttagtgatgggcagccgcctgctgctgggcatgcactggccgagagacctgatggcgtcggtgggtatcagctgggtactcattaccctggcctgctggatagcacaaaaagtgtgcggacccttcgcgccaccaccgcaggagcagcaggagataaccgagcgtgaacctgaataatcgcgctgacctttaatttttgctcgctagccccatatatttattgtggtggcaaaataaacggtcgggaaaacgtattgtgaccgtagggttacacataacgggttgcataatcgcctgactgtatgaactttctgcaatgccggcattatccggcctcaaagtttcccagctgcggaaggaaatgctaacttattaggtcaggacgtcagtttttggcataatttatccggactctccggcattacaggaatgaatgtgaaatatttgctgatttttttgttcgtgctggtcatcgtcgtgatttctatcactctgggtgcccacaacgatcaggtagtgacttttaattatttactggcgcagggcgattatcgcgtatcaacgctgttagccgtgctgtttgcgaccggctttgtgttgggatggataatctgcggtctattttatttgcgcatacgtctatctctcagccgtgcacagcgtaaaattaaacgtctagagcagcaaattgcaccggtcacgaccgaacctgccgtgccgcagcacccggtcagtaaggaataaccttttatgttagaactgctgtttctgttattgcccgtcgccgccgcttacggctggtacatggggcgcagaagctcacaacaggacaaacagcagaatgccaaccgtttatctcgcgagtatgtggcaggcgtaaactttttactctccaatcagcaagataaagcggtagacctgtttctcgatatgttgaaagaggacagcaacaccgttgaggcgcatctgacgctggggaacctcttccgttcacgcggcgaggtcgatcgggccatccgtatccaccagtcgctgatggagagcgcgtcgctgaccttcgaacagcgtctgctcgccgtgcagcagcttgggcgtgactatatggccgcgggtttctatgaccgcgccgaagacatgttcaatcagctggtgaaagaggaagacttccagctctttgccctgcaacagctgctgattattcatcaggcaaccagcgactggcagagtgctatcgaggttgccgagaagctcattaagcttggaaaaaccaacaaacgtcaggagatcgcgcatttctactgcgagctggcgttgcaggccatgtccagcgatgacctcgacaaggccagcggactgctgaaaaaagccgcctctgccgataagctctgtgcccgagtatccatcatgcagggcagaattctgctggcgcaggcggaatacggcaaagccgccgaggccctcaagcgcgtgctcgaacaagataaagaagtggtcagtgaaacgctgcccatgctgcaagagtgctatcagcatttagacaatcgtctggagtgggccgagtttctgaaacgctgtgtggatgaaaataccggtgccacggctgaactgatgctggctgaaatcctgcaacaggaagaagggcgtgaggtggcgcagctctacatcaaccgccagcttcagcgtcacccgaccatgcgcgtattccaccatttgatggattatcacctggcggatgccgaggaggggcgtgcgaaagagagcctggtgctgctgcgtgacatggtcggtgaacagatccgcaccaagccgcgttatcgctgccataagtgtggttttacggcacattcgctctattggcattgcccgtcatgccgagcctgggcgacggtgaaaccgattcgtggtctcgacggacaataaaaaagaagggcgttatttctttttgctgtgagttttagtcggggctttgttgatcagttggcgcagttttttgagttctttttgggtgagtgccggttcggtattttcacccaagtgctgattatcaatctctggttcttctactttcgcgaccttcctgcttttcttgtcttctgctgcaataaaactttcttcgagtcgtgcacagacttcggcactgagagaatgttcgccctgtaacgccgcttcacggatttgctctttcagcgccaaagggattttaatggttaacgttgatatctcactcatatttaagctttcctaaatataaaacaccaaagtatgtcagctgaggcaggctgtccacgcgttcacaaaaaattcataaaactgtaacaaaagcatcgttcatttgtcgtgaaaacgattggctgggatttatcggtcatgccatgtagaatgcgggcgtcacaattttgtcgtacactatttttgttcaaaacttacaagaggttgaagaaatgaagtccgaaaataaccctaataacaacgacttgaaatcatcaccaattgtagtcgcccttgattacgcaaataagtcagcggcgttagattttgttgaccgtattgaccctcgcgactgtcgcctgaaaatcggcaaagagatgtttacgctgtttggaccgcagctggtgaaagatctgcatgcccgcgactttgacgtctttctcgatctgaaatttcacgacattcctaacaccgtggcgcacgctatcgcggctgcggccgatctcggcgtgtggatggttaacgttcacgccagcggtggtgcacgtatgatggctgctgcgaaaaatgcgctacagccatttggtcaggacgcacctttgctgatagctgttaccgtgctcaccagcatggaagccagcgatttagccgatttgggtatcaaccttagcccggcggactatgcgctgcgactggctacactgactcgtgactgtggccttgatggcgttgtgtgttctgcacaggaagcggtggccttcaaatcgcagctgggtcaggcatttaagctggtgactccgggcattcgtcccgcgggtagcgccgccgacgatcagcgccgcgtgatgacgccgcgcgatgcacagctggcaggggtagattacatggtcattggccgtccgattacgcagtctgccgacccggcacagacgctacgtgatattcgcacctctctggcataaaaggacagggttaatgaaaaatgacgataacagccggctggtttattccactgagagcggcaggattgacgagccgaaggccaaaatcgaaagaccgaagggcgatggcgtagttcgcattcaacgccagaccagcgggcgtaaaggcaaaggcgtctgtctgattaccggcgttgacctcgatgatgccgcattagacaagcttgcggccgagttgaaaaagaagtgtggctgcggtggggcagtcaaagacggcgtgattgagattcagggagacaaaagggatttgctaaagcagctgttagaggcaaaaaactttaaggtcaaactcgcaggtgggtaaagcctgaactctctttaaatagcaatctgctgcttttgaaggcagcagattggtcataaataaaattcttacgtcttttcagaaaacaaccgttttgtttctttaaaacttttttaaaacagtcgccgattcctcagagatttaataactgaatatttaagccattaagtataaataaaccgtaattaatttactttaacttaacgtggtttatttcgcttagttttaaggcctttacttatcggttaacctgatgacctacaacaccacctactgccgcgccaccaatcgtacccagagcactaccgttggtcagtacggcgccacccagagcaccgacaccggcaccaatggcagtattacgaccacggtgtgacatgtttccacatgcgctcacagacattacaacagcaagtaccataccaatagtggcaatacgtttatttaagaacattgtcgttctcctaagaaaggatatcactagcatttcgttaataagtatagttaaaaaaaatcatctccgcgggattagcgtaaattactcataaccgcattgggaaaacaggtaaatagtcttaattaaaatttcattctttttaacagcacaaagcgtcaccttttgaaaacgccgtaaggcagtcagttttttcatcgcagcagaacagcacgcactctttagctattttcaccatacccctaaaagcctcctgctccgagaataagtaaaagggcagataaaggacattccgatgcttaaacaattgaaagaacaggttctcgaagccaatcttgcgctgcccagacatcatctggtgacctttacctggggcaacgtcagtgcaattgacagacagcaggggctgatggtgattaaaccttccggtgtggagtatgagcatatgacgctggatgacatggtggtggttgaggttgaaagtggcagagtcgttgaaggcagtaaaaaaccgtcgtctgacaccgatactcaccgtgttctctatatgcgatttaacgagataggcggcattgtgcatacccactcacgtcacgcgactatctgggcgcaggctgggctggatattccagcctggggcacgacgcacgccgactatttctatggcgcagtcccctgtacacgcaagatgaccgacgatgagattgccgacaaatatgaatggcagaccggcgaggttattgttgaaacctttgccgagcgcggcctgtcgtcaaaagacgtgcccgccgtgttggttcattcgcacggccctttgcctggggaacagacgccgataatgcggtacataatgcggtggtcctcgaggaagtcgcttatatggggatcttctcgcaacagctgacgccgcggctggaggtgatgcaggcatcgctgctcgacaaacactatctgcgcaaacacggtaagaatgcctactacgggcaataaaatcaccgcctttgcacttccaagagactcgcgcccgcatcctccccgatgtgggttttttttgttggcctcacaaaatagaaacaactgatcttaaaaatagaaacactgtttcatttttatggttgcgatcacttttatttgttcaataaatggctaatttagcacccatcggcgagtttactgtcgctttccagccgtagcgccagctcgttaaccgcaatgactgcttaactgacccggtgggaataacatgcgaattaaacgtgcaatcgaaaaaatccctggcggaatgatgctggtgccgctgttcattggcgcaatctgccatacgctagcgccggattcaggcaaatatttggggtcattctccaatggactgatgaccggcacagtgcccattttagcggtctggtttttttgtatgggtgcttcaatcaaactcagtgccactgggacggtattgcgtaaatccggcacgctggtggtcaccaaaatcgcgatagcctggattgttgcggccgttgcctcaaaatttatcccggaacatggcgtggaaatcggctttttcgccgggctatcaacgctggcgctggtggcctcgatggacatgaccaacggcggactttatgcctctatcatgcagcaatacggaaccaaagaggaggcgggcgcatttgtattgatgtcgctggagtctggcccgctgatgacgatggtgattctgggaacggcaggtattgcctccttcgaacctcacgtatttgtcggtgcagtcctgccgttcctgataggttttgctctgggaaatctggactctgaactgagggagttttttggcaaggcggtgcagacgctgatcccgttctttgccttcgcactgggtaacactatcaatctgagcgtgatcgcgcaaaccggcctgcttggcgtgctactggggatgtcagtcattattatcaccggcattccgctgatgctggccgataaatttatcggaggcggggatggaaccgcaggtatcgccgcgtctagctcggcggggcggccgtagccacgccagtgctaatagccgaaatggtccctcagtttaaagaggcagcaccggccgcaacggcgctggtggccacctcggtgatcgtcacttccgtattagtacccgtgttaaccgcgatgtggtcacgcagaatcaaaaatcgagccgttaagggaaaagttatcgaagaacagatggctcgcatcaaataaaacctcgttatctttaaaacggccagcgcctaatcttccttcactcccctttcactggcttaggtcgatgaggggaattcattgagttccgcttttaatctttagaggattaataaattgattatttatcctctgacgcaaagggccattttcttatgtactacgccgttcagcgtgatttctttttccgttatgaaaccgtagcgagcgtacattttttcaagatgcggcttggtgtcatcggctaaaagagaaagtttgctgagctgatagcgcagagcctgcgttttggttgcgtcaatcagataccttgagagtccttgcccgcgaaaagcagggtaaaccgacagagaatcgatatacagctcgtcgtcttcagcttctcttaccagaggaagtgttgattctgtctccgcgataaaagtgggttccagatagccggggaaagcgagaatacagcccgcgagatgtccctcgatgaagcaagcctgggtgaacagataactgtagtaaacgtcctcgcggcaaaatcctcgccgataaaccgctttcgcctcctgtaaatcgctttttccggtgaggtaaagcagcgcattttcatcggcaaagctaatgagctcgataacctgttctgcgtcgtctgcggtggcaggtcgaattacgggagagtcagttttcatgggggcttcatcaaattacggacaagagtaaggcaataatacgcctgaaaaaggctcaggcgtattatcatcccttaaatcacaaattactcagacttagattatttcttaaatccttaacaaggacatttacccagcttgcctgcctcactcggaaagcgcgcgttgagacagtagcgatgaaactctttttccgtcatcggtgttttctcagggtgatggacctgcatatggcgcacgtaattaggatagtcctgtacgccaaccatcagacgaaaactttgcgctatccccttaccaataaatttaatccactggcgcaagttttcagggcgaggaggacgtgccaccatgggctgacagcgagtaatcgtcagcaaggctcttggctgagcgcgataaggtaaaccatattcagacatgacgagcctcccgactagcaagcgggctggtttcgtgcaccgtcggctgtggcgatttcagggccctgcgtatcacgaagaaggcagaaaccagcatagtgacagcaaccagcataaagaacccacagagtgcggcgttaatctggttattgagtacgatagtgtgcatatcggcgatagtttttgccggtttgataatgatgccgttatcgatgccggcagagaatttgttcgcctgtgcgaggaagccaatcgacggactctggtggaagattttctgccatcctgccgtcatagaggtgataaacagccataccgttggcagaatagtgacccaggcatagcgttgtttcttcattttgaataacacaacggtgccgaggataagcgccatcgaggccagcatctggttaccaatcccaaacagcggccacagagtgttaatccctcccagcggatcaactacgccttgatagacaaagaatccccaacctgccacggaaaccgtggtgcctgcgattgtgccaatccaggagcggttattggcaagggaaggcaccgctacgccgaccaggtcctgcaccatgaatctgcaggcgcgggtacccgcatccaccgcggttaaaatgaacaaggcttcgaaaagaatcgcaaagtgataccagaaggccatcattacgcggctgttgaatacgtcgctgatgatatgggccatgcctaccgcgaaggtcggtgcgcctccggcacgcgaaaggatagactgttcacccacgtcgcgagcaataacggtcagcatttccggggtgacgacaaatccccagccgttgataacctgggaggcactctcgaccgtcgtgccaatgagggcggcggggagttcatggcaaaatacacgccagggtcgataaccgacgcacaaataagcgccatgatggcaacgaaggactccatcagcatcgcgccgtagccgataaagcgaatatggctttctttttcaatgagtttcggcgttgtgccgcttgcgaccagcgcgtggaaacctgaaatcgagccgcaggcaatagtaataaacaggaacgggaacaggccaccggagaataccgggccgctaccgtcaatgaaccgggtgaccgctggcattttcatttccggcatcgcgaaaataatgcccaccgccagtccgagaataaccccgattttcaggaaagttgataaataatcgcgggggccagtaacagccagaccggcagaactgaagcaataaagccataaatcaccagcacccaggtgagtgtcgtgccgtgaagggtaaagaaaggcccccagtaagggtgttgagcgacatttccaccataaataatcgccagcatcatcagcacaaaaccaatgatagagacttcggcaatttttccggggcgcaggaaacgcatgtaaacgcccataaacagtgcgataggaatagttgctgcgatggtgaacagcccccacgggctgtcagccagtgctttgaccaccactagggcgagcgctgacaggataatgatcatcacgcctaacgcgccgagcatggtgaccacaccggcgaattcacccagctcctgcttggccatctcgccgagagagcggccatcgcggcgggtggaaataaacagaatgaggaagtcctgcaccgcaccggctagcataacgccgaccaggatccagatggtgcctggcaaaaagcccatctgcgcggccagtatcggccctaccagcgggcctgcaccggcaatagcagcaaaatggtggccgaacagcacccacttgttggttggtacgtaatcgaggccgtcatttttcctgagtgccggggtgatacggcggtcatccagaccaaaaacctttttagcgataaaaaggctgtagaagcgataggcaatgctgtagcaggcgatagcggcgacgacaagccagacggcgttaacgtgttcgccgcgacttagcgccagcatgccaaaagaaaaggctcccaccaacgccaccatcagccagagaattccggacttgacgtttgtcatgatcaacaactccttcaatgtgcgaccttaatgtatggccgctattcttcgtttaaacaggcgggcgcagaaagaagaatacccggttctgtcataggtaacttattgcagacattgaagattacagcgcaaaaaatgcagtttcacagctgataaattaaacataaaatcagaagtgtgatgcagtaaacgctttatgtgaacaagtagggtgagggcgattattacagcgctttggcgcacagttttggcaataaaaaaaccggcctcaggggccggttcatcaggtcttacaacgctaaattaatgcgtagttatcaggccgcaggtttgtcggcatcggctttgtgctcacgatgatgctcagccattttttctgcacgtttctgatagttttcgttaaactgttttttctgcgctggagtcagcagattatacatcttgttctccatggtagcgcgctccaacatacgggcagactgctcctggctaattttgtcgatttcggccttcactttagcctgatcaaaggtatcggatgccaccaggccgtgcagagtatccatctgttttttcatgtcaccgcgatcgtggcgcggtccagattctttccacagcgctttcatttgtgtgcgctgctgctcggtcaggttaagaccggcaaatggattatagtgacgcggtcctttatggtgttccatagcgccctgagtttgagccggtgcgcccgtcgccggggtggtttctgcggcgaaggcgaaagaagccgagctcagagccagagttgaagccacaaccattgcggtaagtttgcgcataattcaattcctcattgttctgttttagccagattctgcaccagctagttttgttgcgtacgttcagcagggggttcaccgtgctgtcttgacgaaatacagtctaacgcgcgaaatgaatagtagtgctaggtactgtaaatgtctgaaagcagacgtgtcacaaactctgcaatcgtggagaatgtgtttagaattcgtaaggttttcaatcatccaactcaaaaagtaagtgataaaactatgaccgtgatgcgttatcagcagcttgcgcaaacactacgtcgccaaattgacgcgcaggtttggctacctggtgaaaaactgccttcgttacgtgagagttgcaaacagtcagggctcagcctgatgacggtgttacaggcttatcaattacttgaaagtcagggggtgattgtttcacgtccccaatcggggtattacgttgcgccgcgccagcacgttcccgtagtgcatcatgcgcaaagtaatctgcatgctgccgaggacattgacgtcaatgatgctattttcaatattcttaaagcaggacaggatcctgacatcgtcccctttggctcggcgttcccggacccgacgttgtttcctcagccgcggctggctcgttctttggccagcgccgtcagacgcatgtcgccgcatagcgccatcgccaatcttccgccgggcaacgaggagttacggcgcaacattgcacagcgttacgcccagcagggaatagaagtgacgccggacgaaattgttatcacctctggtgctttggagtcgctgggactcagccttcaggtggtgacgcagcccggtgactgggtggcgatagaatcaccggcattttatggcgtgttgcaagccattgagcggcgtaagctcaaggccgtcgcaatcccgatggatgtgcagcagggcatggatttgcaggctctcgagcaggcgctggcaacctaccccatcaaggcatgctggctgatgtcgaattttcaaaatcctcttggttgctcaatgtcagcagagaagaaacagcggctggtggagattcttgaggcccatcatgtcgctatcatcgaagatgacgtctatggtgaactctatttcaacggcgaacgcccgatgccgctgaaggtgtcttcctaccgtcagcagattctccattgttcttctttctcaaagtgtctggcgccgggctttcgcgtgggatgggtcgcggcgggtgcgtatgcctcgcgcatacagcgcctgcagctcatgagtacactgtcggcgagtgtgccggtgcagctcgggctggccgattttcttcaccaaggcgcatatgacgcgcatttacgtcgcctgcgtcgccaactcgaactccgccaaaatgcgatgcgtaacaaaatactcaaggctttcccgccccaggtgcgtgtgagtcagcctggcgggggctacttcctttgggtttatttggggacaaggtcgatgcgacaagggtttatcagcaggcgctagctcgaggtataagcgttgcgccgggaaccatgtttgccgtcgacgatcgttaccgccactccttgcggctgaacagttcgttcgagtggaatacgcgtgccgaagacgctatagaaacgctggcagacattgtgttcggtgacattgagagaagtaaagtatgacgtagcgctaataaacgcatttttcatccttgagtgtagaaggagttgagcgttttaatataaattcatcaacggccttatgatatctaataaagcataattagataaaaaagtgaggaaataatgaaagtaggtaatagcgcatctgctatccaattagaaaacaccaacgtactgactccaggaaatacacctatcgcgctcggtgaatcgcccgatggggtcttcactattgaccttgccgatcctgacgctcccgcagaaagtatccttgaatctatatcttctgagcaacgatcattgattggcatgctgttaaaaccttatgacatgatttatcatatttgtgaaaaaggtactgaaaatattaagaaaagttatcaagaaagtatcctggaagccgttcgtaattttgaaaatactttgatggttgcgaagagtgagttagcaaaagttctcactaagcgggagatgattaagctaagtgagttatatgataataagcaaataaataatgatgaaactttcagcgccgaaataaaaaaaataataaattcgatgccccatattagtaaatcacgagcgataatgcagatcctgacagaaggagccagcttaagaatacctttaatgctttttcagggggctttttcaacgccaattccggcactcccattttgctattcaaaagccggtattcagatgcaagttgttatctcttcaaccgaggttctcaggaaattatttggtgccgaaaatcaatcagtcggtgaggtgtatttacaagcttttttacatctagaaggtggagtgagtggagaactgaatctgggcgattatatcgacctaccggtcagcgttaaaggggttctgacgggtttgcgggttaatcacttcggcctttgcgtgcagattaacatacagaacgaagcctggagtgtgggtaaccttgaatacattatcgaaacggtccatcgggtagagggaaacgctagtttcggtgctgatgtcgggccggtaaatcttgccggacagcccaaagtagggagtgataccgtgcgacagctgatttttccctgtaacagcacggaacatacggctaaatttatctctcatttagcgttaagggcactgggcgctgggttttttggcgcgtccgcattaacactcggcgtcgatagtttttccataaaagatgccgctatctttggcattaacgtggcgggaatattggttgatatgagtggacgttttaaaccagacagggtcgttgatatcatagaaacagcgaccattggctttgatatcgcggtgactaccccagttgatatcgcttatcttggggcgttaaacccgatgctgatgttgcgatataacggtgctacggcaatggtgcatgatgtcctggacaaaaaaaagcatcctgaaaatgataatctcaaaaatcagtttcaggaaaaagacatgcagttaagatatcgaaaaaccgctacgccgttgaaaataacctcggcgtttgcggaagatgtgatacgtatctagtcagttctgtttattgcagtgcaaataaccctcttttgccatgtcccaaaattgctgatgtattggcgcatcatttcttgtcgtttggattagaggaatgattatttgggcacagagtctggctttagcatccgaattatttaagttctgttccaggctggttgacagcctggacttttgggacttatttaacgcaccaagtgattcagctaataacccattgtgacggatcctattcgcttcggaactctctaccagagaataataccaggtcatcgtgcctgcttcagcatagagaaccgtggcttgctgagtgtttccgtccttaatgcactgggtcatctgctgatatagaacttcgggcctgctgtcgaaatttatgctgtcagttacgcacccttcaaccacgggcggcaaaaatacagaggaagaggtcgaggtacagccagtcagtgacatcaggaaaatagccttcgctgcaagaatactccgcttatggctaaaatattttatcttttctaccactgaacaggttccttcagttcgttcatacgctgttcaaagtcgttattaatctgcgtcatgatgaattttaaaaaaccagctcgtgcttccgctttctcttcctctgtagcttgagtctctttctgcggattgctgagccttttcattctctcttcaagtgacagtggggcagacgtcgctgcattttgagtggttactaagcctgggcgtgcgatcattatgttttgcatcatgattccttaggttttaactaatcttttggataattcattgagcagttgctgtttagcctgttgggaaagactttcacagtccctttccaactgctgtgtaaagctggtatctattttctgttgagcaatccatacctcgggtgagaattcggcaaggctatttccatatttcaccacaaagcggttttcacgatgttgctcaataatcaccgcacccttccagatcgattgaatgaaagacagcagacccattttctcacggtgggaagtctcgggtatgagtacaaataacgggctaatagcatctacaggcgaagtttccgctatccattcctgaagcagctgcgggaaaatctccggtttaccgagtgcctgccgaaggttggccaccacgctttcatgcgccttgttgcaaaaactttgataaattgactgattattatcgagatattctgcaacggatttaatcgatatcatcaagccggcctgatagccggccgagcgagccgaatctcgcaacagcaccgcatcggcattcgcctgcttgattatttttgccgcatgatgctgtgcctgttgcagcaagctttgaatccgcttgctttgtgcaagggaagaggccgggataagtactccttcaattgctgtcgttttctcagaaaatagggcggtttttggcatattctatggctcgtttgaggtctatttctgcaatctctggcaaatcgttggtgcagaatgcgggcctcgcgctggcgctaaacagcaggggtattctctgtgacagagccagggaagctgtctggtcaatccctcgaggatttgcagcccgccgtgctccagttcttcgatatcaacgggataaccgaatcggacgggctgtctgaaggacaccgataactcactgaattgctgagcatgctgcggcaatttttcgaaatcaccctgataaaccagcgctgcacgatagtggcggcaggcgagaagataggctgtatgaggcagtagtcgccagttatcgacgacctcagcggcaaacgttcccggcaccgcatcctgacaggttactgacagttggaaatgttttatcaaaatctgattcagtactttccgacagtcggccgagtcaaacatctccggtatcctgagttgtttaggatggatccactgacagggattgaacaaaatatcttccagagcggtcatttcatacatcagaaacgctcctgacactgcgtttaacccaatagagatagccagcggcaagccccaggaatagaggtaataaggcgacccaccagaatcgaatcagcgaggttgactgcacaaccggcgtttccgctggcggagacggcgttggagagcgcgtcagaaccaccgaaatatcatcgtaattgaggttattgaagctattttttataaacctcttaatatcactgatcattaatgacgaatcctgagtacgatcgtagctaatcaacgcggcgacatgctcttgttcgttcttccgactgtttccggaggtatctatgcgataactcacgtgaacctgtgccgatgtcactcctctagagcaagcagtgattgctctagccgttgttcgatagccgaatagagtctggccgtctccgctaagggggaagaaattagagaatcagcaggaaacattgccgcgatttccattcgcggcttggaaggcaggttataaatacgcagcagttcgaccgcagaactgaaatctttcagatcaacaaatatctgatagccttcttttgccgtatcttttttattggacgcaatattatttctcagcagaagagaaatcacttcattggcctgacgttgctctaaacccttcaataattcctgttgcttacagcccgtcaataacaatgttgcggcgaaaaggagtgagtataaaattttcatgcacgtaacaatgtctcaacggcactggtcgcttttctggttagtgcactgatcaatgaaacttcaatattgtagtcggcggttttttgctgaatttcaaatagcgcctgcggcgaggtaacggagtcagcattgttgatttttctcaagacttgctgcttttgcatatcatatttttcgatgctgttggccagagtcgaaatcagtttctgatcgagcgttgtaagactaacgtcgggagactcagaaatgatatttttagatagcgtcgtcgtgacgtcaggtgcatacagcataatttctcctgcgggtaatgataaagattaaatgttatctaaagttggaaatagtggcagacgcgatgtctttataggcctttatggtacttgattgcgcattgcaaaaaagtgtataagcagaaagggcagcctgatactcagccagcgcaataggatccgatgtgttgctggggttaccgtcaggaccctcacctctaattttatccagggcatctttcaattttttatttagatcggtggcacctttgttaaacttatgggacatatcaatgataaattctgggtcgacggatttacttatattaaccatggtgactctccacgttatagtttgtttattaaccaatgttcagatgatatttttatgtaaccttgatttccaaatttaaacgacttgttagccctgtaatcatcctgtaagttcacggtgaagttaacaggttggtctttataactcactaccaataattttaattgctgtaacgactcatcattaataagaccgctaataataaagttaacattattattattattggaacgagtataggttaaagacatccctcgcagcgcgttctccgcatcatctgccgtaagaataacgttagagagtgacggagcttctggtaatgaatgaattaatttttgcggtagaaggggtatcacaataggttgaaatttaattttcgactctaatgttgcagcagcgccaccttttaaccagatacaaaaagtgaagagcaataaaaataggctcatcaacgtcaaaatcttcttcttaatgccgagagagaaccgcctcctgcgagaagcaatcggctggttaatctctggcaaccatgcttcattagccgttttaattaccaccttgagaaggccaatattaatagtggtatgaaatttaaccgtagtggtggtttgtccctctggacgctgttcacgtatcttaatgccattatcaagtgagccatcattgataacttgaaaattcactccgccttcttcaagaggaatgataaaggcattcgccagaatgtgtgttccttgttcaagaattttttctggagcgacaataaataacgtactttctttcgttagctcaaactcacaaccactaagtgggccgttaagtaaacgtatcgtcagtttttttctcgaagaggatgataagactgcatccttgtcattcttcatcttaacgataattcctggtgatgataaatcagtggagcacaggctaataaaatcacctttagagatcttgatttcattatgatcaattatgatgattttcattaggcgcagcgttgagataacgggagtgtgtcagattatttcgatttttcagtatcatattcccatcaagatggggatagtgcctgtagctacaatcaaactcatcaaattaatctatatctacgggaaatagactttatgcgctttgaaacaattccgtatattatcaaggaaggggaaacaatcaaagttacagagaaaaaactgtgtttgattgaagcccttgattctgagccttgtgaagttctttacactgtaagaaataatgaagaaaactctttttcactccagagtaactggcgtggtttaattgcattagacgttatgcagttcaaagtatcaaaaggtagactgcgtttttttgatatggatttaatgaagctagttaaactacaagtctttatcgattattctaacgggaatatcgaggtgggcagttctaatgagagtaattggctctcattttcaaaagaaataaaattaatacaaccggaagacatggagtattggcttctgcagcaagcaatgcagacgggggataaagtagactctattgttgcctttcttcgtcacaccgaatgctataatttggtgcatttcttattatcagaaactgatgataataatcaatgtctgcaaacgctctgcgttcgttatggcctgtcagctgcgcattttcgtcgccttacaagacatgcgctaggccatacaacaaaagttacgcttcgtgaatggcgcatgacgaaagcgattctggcgtttattaatgatccaaaaaacatgaccgacattgcttttgcacacggatactcgtcgttatcccatttttcaaatgacgtcaaaaaaatgctgggcatgacccctcgtgcattaagaaagtcaattcttgatatagcaatgaaatgataaatagactcttatcaataacaatgaaaaatttaatgattgcagcgttgagcttaatgattatttttccggttaaggctgagaaaataaaaagcgaagatttaagtctatccagcgcgggctatgtctcgaataatgagagtatcagtggcttttttaatgctttttcttcgcaagttaataagccggtaattctgagtaaactagcggcacgaaaaaaaatcagcggagagatctctttagttaatcctcgactgcaattagatacggtatgcaatcgtctggggctaatttggtatagcaataatgcaacactttatatttatgactcatcagaaatagttagccgtattgttacgatgagaaatatttcttattcatactttactcattatctcggtaaggtacagttactagataaccgctacccgttaaggggagaagagggtaacaagacattctttatctctggtccaccgatatatgtcgaaacaattgctcagttagccgcaacgcttgacgaacaggataccagtcgacgcgacatagatgccgtctccatgttttacttaagcaatacttttgctgaagaccgttcctatacctatcaggataaagtgattgttattcctggcctggcgacggtgatcagaaagttattctcaactccgggcgctgtttatagcgatatcagaacatctacaaccgagataacaaaggtaaggttaccaccgccttcactcccgactgttgatgacatcgaaccgtttgatagagcaacgcaagcgatagtcaatacatcttcagccgtgcagattatttctaacccaagcaataacagtctgcttataaaaggtagcgaggagcagattgcgctggccaaaaatattattgccgcgatggataaaccgcgtagacacatcgaactctctgtatggatagttgacgtacaaaagaaagcgctggaacaacttggggcaaactggaaggggaattttaccattggtgaccgtctcggtttttctttgaatcagggcgcttccgcttcttccacgggcggtaacctctctagtacgttagacggaggacggtttatcgctgaaattaacgccttaagccaaaacaatctggcgaatataatttctcgtcctgtcattctaacccaggaaaatatccccgctatttttgacaacagccatagcctctatacaaagcttctcggtgaacacaacgttgaacttcagaagataacctttggtacctctattagcgtattgccgcgtttcactcaaaataatgaaatagaaatgatgcttaatgttgaagacggtaactctgcaggatcgacgtcagaaagtgaaaatctggtctcgcccctgccgttagtaatcaggacaaatatcagtactgtggccagagttccgcgaggcaagagcttactgattggcggttatacgcgtgatgaagatagaaacgataccgtgaagatcccttttctcggcagtatccctctcattgggggactatttcgccatcgcattacccaaaacagtaagacagtacgtatttttctcatacaacctagggaaataacctcagaaaatgcctccgaggctaataccttatctcctgaaatgttcacttctacccgttaagggactggaaacagaatttttcaatgagtctgttatgagttcgattaacagggattattcgcatagtccgttgcttcgcgttcgcgagcagcagcgagcaaaagcccaggcggagaaagagtcgtcaaacgaaaaggtgatggatgaggggagcttgacagtgcggcgctttcacttacggaggacgactcctcggcagatctcatcgctcgcgcctcccagaatgtcgatgagagtttaattgcgttatcgcagtttagatcacgccgagatctcacgctgaaaagcggagcggatgctgaaaataactttgattcaatcctggatgacaacacactccctaaaatagcgctactgttaaaaatggtttctggtgttcagggaaatagtattcaggatatgcacttcagatttctgaaattgttcccagatgagagcgatcgcgtactgatattacgtaagttgttaaagcgaaaaaacctcgatgaaacaacacgaaagaacatcagcacattgctcgaaaatacgcttcaggctgccgacccacgtagattgcaggctggattaaacatcgcggtaaaagcacgcctgtttggtcaatttttagatattaatcctcagctattgagaagcgcttaccggtattttattgagtcagatgatgcagagacggtcatctataaaaattggatctctatttttggctataagaaaagaaaaacaattttagagcttattgaagagtttttgttaacagacatcgatgcattagatccaagttgttcattgacggaatttggtaatgtattattaaaattgaatcaattaaaaagattaagaaccgtcgacggagatttcatcggaaatctgttattgaatgaaaatatcttcaacgttaatgagagtgaagaggcttggttgttattcttttttgtgtcttgcaggacgcgagaaatcttgaggagtatctgaacgaagttgccggggaatttttaatggcaggggagcctagtggctgtgttcgttttgtacaggccttatatattgaatgcagtaaaattcctgtcgaattttttgatgtgtctgaagataagtcttggcttgaagagcatttgaaagactctatttccttccatttcgaaaatgaaatcatcaaatttaaaaagcttaatcattagagttttatggaaaataaatgaacaagattttgaaaaacgttagagagcacccagaacttatcatcttattattgatggtgacaataatatcaatgctcattgtccctctaccaacttatctggtggattttcttattggtttgaatattgttatctctatgctcgtttttctgtcctcattttatatcgatggaatattaagcttttcaacttttccagccgtgttgttgataacaacactttttcgactttcattatctatcagcaccagtcggctaatattgaacgacgcggatgcgggggagattattgagacctttggtctttttgtcattggcgacaacctcattgtcggatttgtgatttttttcattgtcaccattacacagtttatggtcatcactaaaggggctgaacgcgttgccgaagttgcggcacgtttctcactcgatgccatgcctggcaagcagatgagcattgacgctgacgtcaaggcggggaccctagacgccgatcaggctaaaagccgtagaaatattcttgaaagagaaagtcagctttacggatcctttgatggtgcaatgaagtttatcaaaggtgatgcaattgctgggattatcatcatttttgtgaacttcataggcgggatcagcgtcggtatgaatcagcataacatgtcgatgtctcaggccttgcacacctacaccatgttgacaatcggcgatggattggttgcacaaataccctcattgttaatcgcagtcagcgccggatttattgttacccgcgtcaatggcgaaggtgacaatatggggaaaaaaatcctttctcagttaattaatcatccttatgttatcgccttggccgccatattaacccttgccgtcggattactgcctgggttcccgatcatggtatttctgaccctgtcgttactacttgcaggaacttattggtataagcaaaaggcgcttagggaaggcaaggatagcactaataaaatttctcagggtgagagttctcacaatcaggcggcagacacgggcctcgaaagctcgatgaaaatgatagaccattttgagagtgtcaatgcagaggctgtgcctttgattcttgttttacccattgagcaatttcaaaagttaaaggatcaggctctttcggaacatattcgcagccagttctttatcgattatggtatacggctcccggaaataatattgcatagcgctatagtcgataaaacaaataaagtcaccttgcatattaatgaaattaaagcggcggagtttacactctattttgataagcttcgcgtcattaataaattagatgaaattgagatgttagctatcgagacggtaaaagatagcagcggcatctgggtagagagtaaagacagagagagtctagagtcgctgggatatttgctgagaatgcctgtcgatgaactttattcttgcctgtctatgcagttgtcgcatcatatcaatgagttctttggtgtgcaggaggcgaaaggcatgtcagatcggctggaacagtcctgccctgagcttatcaaagaagtattacgccacatgaccatgcaaaaaatatcagaaatattgcaacgtctgttatgtgaaaggatctccattcgtaatatgaagatgatcatggaggctttggctctgtgggcacccaaagaaaaagacgttattttactagtcgagcatgtgcgcggtgcattagcacgctatatctgtgacaagttctcaattcataatcagcttcgtgtcattatggtgacggcagagacggaggatgtctttcgcaaaggaataagatcaacatctggtggttcatttttaaatattgagccagcagtagcagaaaatctaatggataccttttcggtagtgttgctaaattatgactcagagtttaaggacattgtcattatttcatcggtagatgtgcgaaggttcattaagaagtttattgagactcgattcaaagatatcgccgttatgtcgtttggggaattatctcaacacgtcaacgttgacgtcatacagaccatttaagcaggtgggcaggtgaaatattccgaactgatggtgaagcaggtacacccgttgattttacgttccagcattattgaagctgagcttaaaggcgtcaaaattggggaaatatgcgagattcgcggcagtgtttacagtcctaaggttattgctcgagcgcaggtcattggattcaaccaacatacaactgtgctgagcctgcttggaaatgccaatggtttatcacgtgagtgcgttttgcaccctacgggtaaagagctggttattcctgtcggtgattttttgtgtggatgcgtgatcgatcccgcgggaaacattactgagcgttttacagaaacaccagaaacgcaactaagccatttgtgttccattcaagccaacgcgcctggctggcagcatcgtcgggggatctatctgccactcttgacgggagtgaaggcgctggatggtctgatgacctgcggtgttgggcagcgcgtcgggatattttcatccgcgggctgcggcaagacaacgttgatgcatatgctcattgagcacattgaaactgacattttcgtcattggcctgataggcgaaaggggcagggaagtcaccgagtttatggatattcttcgcaaatccgggcggcgaaaagattgtgtgatggtctgcgcaacctcggacaattcgtccatggaccgttgtaacgccgtattggttgctacgacgattgccgagtattttcgtgacagtggaaagaacgttgtactgtttattgattctattactcgatacgcgcgcgccttgcgtgaccttgccctgtcggcaggagagtctcctgccagaagaggatatccggcctcggtatttgacaatctaccgaagattctcgaacgagcggggaatgtagaaggaggagtattaccgccttttacaccattttgcttgaaagtgatgatgaaggggatcctatcgccaacgagatccgatcaattctcgatggacatatttatctcagccgagaattggcagcccagaatcactatcccgcaatcgatattttaaacagtctcagccgcgtggcgactcaggtctgcaagtctgatcatcttaacgatgcggcggcggtaaggcggaaattggcgaagattgaagaactcaaaatgtttatcgatatggggaatataaatttggtgaaaaccaggagaacgatcgagtagtcaagcaacgagatgcactaaatcaatggctctgtcagtcctgcgatgagattgtcgaccacaaagaaatgctgagtgagatgagtaagtttgcatcataaatatgcagtacttctgcagcgtaacgagatgcggcttcggcgtcttcattggctactaatggaattagagagccgtcagcaacggttaagtagcgaaaagcaaacgcaggcaacccaggtcgaaacactgcgtaatttaatcaaacatcacagtttcgccggggtttcgactcgggcagatttatttgcagaacagcgtaagttagcggttttgagaagacagctctttgccattattcagcaagttcaagagattgatgaaaaattagatgatatcaagcgtgagattattcaacaccgggtactcatgctaacgggaatgtatcgttcagaaaagtacaaacatctgctgcaaggcgccttgagtaaaaaaaggcaaacccaaagtcggcaggatgaatcagaaatggaagagatgattttatggaaaaagtaacttcgaaaccggccgcgggtatatcaaggccgcaaagtgatcctacggaaaatgtttctttagctgaaagagcaatgagaaaaaaactgggccaaaagaagctcctgaaagcagaaccctatgcattaattttacctttccgaatgcttgaacattatcgcctgatcgttattaagcagaaggacgaaaacggttccgcttcttcaaaaaccggccttgctgaacctttacacgtcacttctttgtttaacagggaagagcaggggcaatcaggtaccaccttgcctgcaacgagagtcgagagcgcacctgtcgatgttgcaaagcgaaccaccctcgcttcgaatgaaaatactcgtcccgccgacacattgagtgacaatactcctccaactggcatctcgagtaaaaatactcctttagtcgacacctttcagcctaaagcacccgttgaaaatgccgatgttgatgatgagttttcgcgtaaaactccggacgctcattcacttcagtccctgatggggcgtgcttcatttgttgccaatcatcctggtgcaccgattttgagcgagaagaagagcgcagcactaataccacagccccgagaggttcaaccagacagctcggcattctcatcggaatcgtttacctatcactttcagcacttacccggaaatcagagcgtaaaaattaacacggttgttcaagggcaactgtcattacatccttcctcaaaccttgtacagaatctgttattgcagaagaaaggactgcgagaaattgcgacagaatggtcattatccctgaattctcgcaggaaagggacgataaaagtgataatcaacagtgattgctaactaccttcgccgagtcacccctgattcgctaaatgaaaaccaatgggtccagcaatggaaagccaaaggtaaagaaatcatattttcggcccctgcaaagggtggagcactcttgtccttcagtgccgaaggtaaatggcgtggcacaatcgatttacatcactggttcgccatggtcctcccggacagcagccggttgtcgaaagaaagctgggatgatgaacagctcacggcactcttttttggctgttcgcgcccgctggatattaccgaagatgagttgcattacgttcgtttaacagcttgccgccgctctatcgttaaaaattttcccgttaaagacatgccggaaatttgcaccccgcagggcacgctatggcttagtcagttacctaaagcggttaatcatatttctctttcacttggcagcgtagcacgaagaaagaatatgcccctaaggctggatttttcgatgggggaaagtcgaatttctttgtcgctgctctccagcatgaaaaaaggcgatgcacttctcatccaaaatatgctgcatgatgtactgattaataatttgaagatagggaattacgaacaaaaggaacgccttatgaatatcgaaacgaataatataacgactctatcaattcaaaagaccgtgggggaggatgcttttttggaaacaaaaaacacgcagtccattaaaaaaattccattaaagctatctttcatcttgcagcaagacgttattacgctcggtgaactggagggtatatataatgggcaatcaatcccctgcaatccagactttgaaaaaaaaattataatccaggcaaacggattaaccatcgcccacggagagcttgtggttattgacgattgtatggccgtccttgtcaccggtctggaagccgatcatgccagttaacaatgatattcctcttattgttgttcttgctctggcaacgatcctcccctttttgattgcctgcggaacctgctatatcaaattctcgatagtttttgtcatggtccgtaacgctctgggattacaacaaattccctcaaacatgacgctgaatggcgtcgcgttacttctggcgatgtttgtgatgagtccgataatcaaaagtggctataccaattatcaagaaagtaagacagatattacgcaaatgtcatcactgatcgactatatcgataatgggattgacccttatcgtaattacctgacgcgttattctgatcctgacttaagcgacttttttgaaaagatccagtccggaagggaggcgactgaaaatggtgaacaagatgaaccacagaagctgtcaattttatcactgctgcccgcttacgcgttaagtgaaattaaaaatgcgttcaaaattggtttttacctttatctgccttttgtcgtcattgacctattgatttcatgcatattgcttgcgttaggcatgatgatgatgagccccgtgaccatatcggtaccgattaagctggtactttttgttgtcatggacggttggaccattttgtccaaaggtctggtgcttcaatatatggacttaccggcttaggaaaatactatgaatgacatgctttatgctggtaacaaagtcctgtatctagtgctcattttatcggcgggtcctatttttgttgctaccgtagtaggattgctggttggacttattcagacggtaactcagcttcaggaacagacgcttccttttggcattaaactgttaagtgtcacgctttgcctgtttttactgtccggttggtacggagaaatccttttagcctatgggcgagaggtcgtcagactggctttgagtcgctaacttatggctaatcatgttaactgaatataatgaattgttttaccattggttgggcgtcatggcattctcttcggcgaggatattgccaatatttattatgctcccattcctgaacagcaatactcttaataattcaattcgtgtgcccgttgcaatgttgcttgggctttctctttggcccaaaacagcaggggtaaaatttgattttcaggcggagatgtatttcggtcttttagttaaagagtctatgattggactcttattgggatgcttaattagcctacctttctgggttcttcacgctgcgggatgtatcatcgacaatcagcgcggagcgacgataagcagcagtattgaccccgtgagcggtgttgatacttcagagttagccaatttttttaatatattttgcgctgcaatatttttacaatcaggagggttgatattgacactagaggtaataaaagaaagctacgaccttttcgaacctttgacttttaccttgccgaatatgatcccttgctcaatttaatcactgaagttatttctcgttcaataatggttgccagcccattaattgctctttttttattgactgaggcaacgctcgggttgctttcacgttatgctcctcagatgaacgcattttcattggcgttgacggttaagagttttctgggctttttgctattaatcatttattttcatccaattttttcagacagtatcctaccccttatttttacaaccgaaaaactacagttatggaagtaaatcactcatgtcattaagcaagacagagaaacccactcaaaagaagattagtgatgccgttaaaaaaggccaatcctttaagagtaaggatttggttattacctgtttaatattggcaggcgtcaattatattattactttagattttatcaaacagatggccggcgtctggggaatgataattgaagacggctttaaacagaatatagcagactatgcttcgtcagtctttatcctcgcactaaagataatcataccttttttattgctttgcgttttctgcaccacgctgccttcactgctgcaaaccggatttgttttggcaaccaaaatatttaaactcaactttggtgcgttgaatccgatcaacgggaccaagaagttgtttagtttacgaacggttaaggatactgtgaaagcagtactttatcttttggtctttatcattatttttatgaatctctggagcgagaacaaaattctcttcctgcttcaaagatacggtacgcctcaacaaacgctggttatttgggggcaccttattcagcgaatggtaactacatgtttgcttggcatgattattatcatgttgttagatgcgattgcagaatactttttatatatcaaagatctcaagatggacaagcaggaggttaaaagagagcgtatagatcaggatggtaatccgctcattaaatcaacgagacgaagtttgcattctgaaattcttgacgagcagacaaaactcgatatcactaactcaaaagttattattgctaatcctacccatattgctataggtatttatttcaatgccgatattgttcccatccctttcatttcagtgctcgaaacgaatcagtgcgccttgtcagtaaggcgatatgcaaaaaaaatgggcgttccggtattggaagacattgccctggcaaggcggatttataagtcacactcaaaatattcatttatcagcgttgatgaattagatgccgttttacaaatcctcgtttggcttgaacaggtcgacaatgcgtggcaagaagatcaatcgtctttaatttctgaagcctctgatgaggttaataataaaaatggtgagaatgagcgatctttataagattcatataaatatcgatgatgtaattccagcatcaaacagttcccactttggtctgcgtagttaaggagtattcatggaacgaactgacacgattaacgatgataaaattgcagatatgttgcttgggtgtttgaatgaacaggcaacattaaaggatattcacaatattcctgatgatatgatgaacagtctttatgcctatgcttatcaattttatcagcagggtaagctcgataacgctgagactttttttcaatttttatgcatgtatgatttttataatacagattattttatgggtcttgccgcggtctatcaattaaaaaaacagtatcaaaaagccgccgatctttacgcggtggtttttgcaatgaacggcaatgattatagaagcgtatttcatgccggacagtgtcagctaatgatgaaagaaatgctgaaggccagaagatgttttgagctggtttgcgagcaaagtcatgatgttgaactggttcagcgggctgaagcttataccataaatatgaaaccctgctctgaagatgccatgaacgttaagtctgatgcgtttaaaactcagccggagaaatgcaatgagtgaaacggttattctgcaaaaagggcccccttatcggtacctgaaactttaaaaccgaaagccgccgacttgtcccaggaacctcctcaaagcgttgaaatgagtaatatccaggctgccgcgcagcagactgcggtcaaaatgatggtgattggattaagtgaaaccgtgaatctgacactggcggcttcgcttaaagcggatatccctcgacttgctcttcctaccacgccattaaatgttgaagccaagcaacctgccggcctctcagctttagtggcagggttaatgcaaatttttgctgacggaaacacccataaattacagaatcgacttagccagattaatgcgctgagcttggccaagacggcaagtggccttgcgcttttaaatgagtacatccaggcaaacgctgagagcgcccaggtaattcaagaggcaacggctgacggtgatgcgtttgtcacggcgaacaagcactacgaaggtgctaaatctgactatgaggctgcaaaagataaactggcagggatgaatccttcagatattgattacgggaaggctcaggactcactcaataaggcaacgggaaaactcagtcttgcgtcaacggcgctgggtatagcaaaagataaatcgatagcttcagctagtctcgccaccgagaagatgcttatcgttgatggcctttgggacaaacttcagaagcagccgaatgtagatagagtcgtactcaaaacgaccaacgaacagcatctcaccggcttggcggcaatgactctgttgctcggcacgctatccaatctgattggagacaatgcagacaaaaaacttcaagccagcgctaaactctcaagacagttgcaggaagcacggcaaaaagaaatggagtcaaaagccaaagagcaggccgaggagatccgtaaggcagaacatctcaataagatcatgggctgtgttggtaagattttaggcggaataatcatggcagtaagcattgtcggagccgttttcaccggggggctagcctggcgctggccgcagtaggcatggcattgcttatcgccgacccgattgttgccaaagtaactggaaaaagtattaccgacagggtgatggcgccagtcctggaacatgtgatccagccaataatgaaatttgttgcggaaaaaattaaatcttttttgaatgatttaggggtgaaagacggaattgccaatattatttctaccgttactgctgccatcactgttgcggtaatcatgattgccgtcggtgtggtcgctaaaaatgtggcaagtgcattgcttaaaagaatcgtcccaataatgagtaaagtcatcaataaggtgatccaaaaaacggtaccggcggcagtgagaaggacagccagtaaagtttcgacctctatgagtaaatctgtagcgcggttaggtgaacagctaggatttaaaaatgatgtggtttctttaagaagttatgggcgtaatatagactatgccgttatgggtgccgaggtttctaaatctaccgtagagaccgcgaacagtatccagttaggcatttcaactaaaaaagtcgccgataaagaagcggatattatagtcgctatggcagatgttaaattcattagtaaatatctcaagcagatgatcgaaataattgatgcagataatagggctaagttaaatattatcgaaacggtgagttctattaatcttgcaaggcagcaaactaatttatcgattgttaatttacagcgcatataagcgctttgggagagaagcatgaccacgaattatataaatctacgacatattccaatatttattcccactaagggctctgaaggcgaccgcaatgtcagccctcttgccgataaagagcctgcttctgcggcattacaaatcaacctaagtcgggttattacggaagagataacgctggagtcacgtcctccttcctcgagttccccagtcctaaataccaggtcaagaggcaaggcgagtgattttagcctgtcgattacagatttaattttcttgcttaaaaaactggaccaaattgctctcaaacagagtgccgatggcatgattaatgcgcaatcttccgtgaacagtaaggcgacctcaattcggcaggaagggatatataactgttcagcagcagtcgctgggggaattactcaaattgcggtcatgggcgccagctatgtactctcagcgcactcgttaagaaagcagaagggtattgatggtgctgctgaaaaaataaagcaagacggcatctcgcagattggcgctaaaagagataaaaacattgccgacatcaatgaaaagtataaacctcaattggatgaaatccatcctaaaatcgataatgagtatggaggtgctctctcacgtccaatccgtgaagagagagatggtcacattaaaaatgaaaatgcaaatttcgaactagaaaaggcaaagttagaaaatcagagaaacgccctgtctaacgatgataaaaaaagatatatgaatgccagtcttaatgttgaaaaataccgtacattaggtcagctatcgcattcaatgggtaatatgatttcctcttctatttctatcggcgcctcagaggaacgtgccaagtcctcattggctgagatgagctcctcggttgaaaataaagttaccgataataaccgtgagcgcagcaataactataaaaatacggcctctgagctgattaacagtatgaatcgaatactggagaatatttcaaacaccataggtgagatcgcgagaaaatgctagtgctccctaaatcaccaaggataataaaatgactaccagcattggattacaactctctacttctagtgttagatacgacgcacagcaagctcctgtattacctaaccctaaggcgttatgggttgatacggaggaaaacgttaattcatcggtcacggaaaaaaacagcgagcttgtgcagtcgcttaatgcttttgaaaaggcgttacttgccaaggataaatccgatgcccccttcatgacgcagttgatgcttaaaaaccttagggaatatgaaagtaagttaacccttgtcaaggctcaggataatctagtctttgtcgctgagttcaaaaatctaaaacaacagatgcaggataaattgtcggtaaagagttcagcggtggcctatctttctgacaatgattcaaacatctctgaccagattggtgaaataataggcgaggttaaagaggggtattatgatatctttgaggggctttagctaaatatattaatttttataaagaacttagtaacattatgtctgaaatgggtaagctcattaaaaaaagtgataaagaaggctatctaaagtacgactttaaaacgttgcaaggaaagcttgataatctttatgataaatacaataagaaggcagatgacggttacaagctgtctcaactttaccctaaagatcctaaagataatgtatccaaggtcgaggctgaaaaatgggctaaggacatgggattaccatcaggcagcgtattacaatcccaatatggtggagattggtactatgttgcgattgatttaaccccgttaaaacagatgaaggataatcttatctctagtacttcaaatgactacgaattactcaatacccagtatgaatcttgggtgacgggttttaacgcccaggaagatcaaataaaaacgacgcttcaatctttaaccgggcgttttgcgaacgctaattcggtttatgataacatggttaaagtcttatcaagcacgatcggcacattggccgaaatgtccaggcgctatttttcaatataatttaccgtatttgggttacagcatggttagcactttctctttttatctgttaattcgtttgttggtaataaaattttaacgccgatagccatgtgtttttttccggatatttcgatataggtaatatccataccgaagatcttttgtaaaatctcttcataatcgacggcctcgggcgcgggtatgggcgtgggcacagacacggggtcggggcttatttcatagggtacaggaataaactcacagacttcagcaacgaaaacatacccttttgagtaaatcgtttggatataaaccttttctttgtcttgccggaatatcttccttaatacataaatgcagcgtgcaagagactcctctgaaacaatagccgatcccaaaccttatcgagcaaatcatttttctcaacgagctgtcctgcagactctatgagcactctcaatacggcaagctcttttgctccggtcctgataaaagtacttttcctcatcaactgattgtcttgagtcagagtgaaatcaaaaaatctataacctataccttgagtcctttgctgatgacgcatattattcccttgatttttagttaacgggtaagatcatgtccgacttgaattttatttacaataataaatatgccgactgtcgatatatattctgattttttagatttaattcataaatgtttaatatgaagctagttacagcttaaatttgggatttattaatttaattaatttaatctatcggcattaatgtattttaatttcttatcaatagataatccagtgacttaataatagaaagctcttattggcctttgtgaaggccaataaataatggctatgtgcaccattttggtgaggatttcgctctaaaaagaggcatttattttcttagtctgcgccttccctgtgtaacagatcacaaatacggcagatatttttagttatttttcgttgcatactcattctcttaaagtatgacccgtaaaggggtttttcataaatattcactttttatgcagttaaagtgaatagggttagggtttaactccttgttttttggtgtctcgaccttttttattcactttttttcgttgctggcacgatgtctgcactctattatcaattcatcagggacaaaattttaaatcccttaactctaagacgcttacagacagttaagttgattttaccctaaaagagctgctcgttatgcgtgcagcgacaatttgtagaaaagatgactcattaaaaattttccttctctttaagagggaaagggagtctgcacccttaatttaggaaatgcgttctcaaaaattaacgtcaaccgtcttatcaatggcttgcactaaggccgagagacgatggcataagcaaataacgatgaggttgatatggaacagcgtgtaacccgcaaagcgtttgatgaatacatggtcccggtctatgccccggctgattttatccctgtacgtggggaaggctcatggctgtgggaccagtctggtaaagactatgtcgattttgccggcggaattgcggtcaatgcgctggggcatcgccatccagaggtattaagtgcgttaaccgagcaagcacaaaaagtctggcatttaggaaatggttataccaatgagccagtactgaagcttgcgaaacagcttgtggatgcgaccttcgccgacaaggcgttcttctgtaactcaggtgcagaagcaaacgaagcggcccttaaacttgcgcgtctggtcggacactctaaaaacgccgaccataaaaacgagattatcgcctttaaaaatgccttccacggccggactcttttcaccgttagcgcaggcggacagcctaagtattcccaggacttcgccccgttaccgcctgccatcacgcatttgccgttcaacgatttatcggcggtagcgaaccatatttcctctcgtacctgcgccgtcattgttgaacccgtacaaggtgaaggtggcgtagtgcctgctgatcctgagttcctccatggcctgcgcgcgctgtgcgaccagcatgatgccgtgcttatctttgacgaagtgcaaaccggcgtgggcagaaccggcgaactctatgcctatcaggcctatgacgttgtccccgacatcctgactaccgcgaaagcgctcggcggtggtttccctatcggcgccatgcttaccgtcgacagtctggccgcacatttccaacccggcacccacggcaccacttacggcggtaacccgctggccaccgcagtcgccggtaaggtgtttgagctgattaatacgcctgaagtcttgggcggcgtcgcgctgcgccatctgtggttcaccgagcgtcttaacctgattaatcatcagtatcacgtattttctgagattcgcggcatgggcctgctgctcgggcggtaatgcacgaacgctataacggacaggctaaacagctgaaccagctggcggcagaagaagggttgattggcttaatcgcaggtcctaacgtgctgcgattcgcgccatccctgattattccgcaggctgacgtcgaggaaggtctgaaccgtcttgagcgtgccatcgcgcggctttgttcctgaaaaccgcgtcatctctttgaatgaggtaattatcatgatgttgattcgtcctgtgcggctcggcgatatcgccgatatcctgcagttgtcagggaaaaccggcatcggtttaacgtctctgcctaaggatgaggcccacctgcgaacgcgaattgagcgctctgtggcaacctggaaaggtcagctggacaaagccgagcagggttatctgttcgtgctcgaagacctgagccagcagaaagtcgttggcgtcagcgcgctcgaggtggccgtggggctcagcgagccttggtacaacttccgactcggtacgcttatccatgcgtcgaagagcctgaacatctacaaaccggtcccgaccctgtttttaagtaacgatcacaccggttacagcgagctctgcacgctgttcctcgatccggactatcgccatagccgcaacggacagctgctgtcaaaagtgcgcttcctgtttatggccgctttccgcgagcgctttgcgccgaaggtgattgccgagatgcgcggtgtatcagacgacaacggccactcgcctttctgggacagcgtcgggcagcatttcttcgccatggaatttgccgaagcagaccgtctgaccgggatgggacagaagtcctttattgccgagctgatgccgaaacaccctctctacaccgagttgttaagcccgcaggcgcgtgcggtgctgggcgaggttcatcctcaaactgccccagcgcgtgcattgcttgaaaaagaaggcctgcgctatcaggggtacgtggacatcttcgacgcgggtccgacgcttgaaggcgaggtagacaacctgcgtgcggtgaaagaaagccaattattgccggcaagaatcactaccgccacgtcgttcgaagatgaaactttctacctggtcgccaacgaaaattacgcaaattttcgcgcgactttggtcacggggcccgcagatatcagccggttaacgctcgacgagcgtaccgctgaggcgctgtgcgtcacccatggcaccccttgcgcgttgtgccgctgttccccgacgcggcgacagcgacctcaacccgacaattatcacaagcgagtgaactatgacccatccagcactatttattcagggacagtggcgcagcgggcaaggcacgctgctggaaaagtctaacccggtgagcggtgaaaagctctggtcggccatgagcgcaagcagtgaagacgtcgagtcggcctgccttgccgcacgtgaggctttcccggcgtgggcgcgcctgacgctggcccagcgtggcgaagtcattcagaaatttgccgcgctgctgactgaaaacaaaaccagactggccgaaatcatcagccttgaaaccagtaaaccgcgctgggagacactcaccgaagtgcaggcaatgataggcaaggtggcgatttcgctggaagccaatcaacagcgtaccggcgagaaacatacgccaatgccggacggtgaagcggtactgcgtcatcgtccacacggggtgctggcggtatttggcccctacaatttcccagggcatctgccaaacggtcacatcgtacccgcgcttctggccggtaacacgctggtgttcaaaccgagcgaactcacgccggtgaccgccgaagagacgctcaagctgtggcagcaagcgggacttcctgccggcgtgatcaatctggtgcagggtggacgttctaccggtgaggcgctggccgcttcatcgcagattgacggtctgctgtttaccggcagcgcgggcaccggttatcagctgcatcgtcagctggccgggcagccggaaaaaattctggcgctggagatgggcggtaacaatgcgctgatcgttgagccggttgaagacatcgacgccgcggtcaatctgaccattcaatcggcgtttatctctgccgggcagcgctgcacctgcgcgcgtcgtctgttggtcaaacaaggtcaggcggggatgccttcctcaagcgcctgattgaggttacgtcctcgctgcgcgttggcgcatggaatgacgagccgcagccgttcatcggcggggttatttccgataccgctgcgcgcaatatgctgagcgtacaggacaaactggtcgagctcggcggcaagtcgctgttgacgatgagccgcctgcgtcccgacagcaccttattgacgccgggtatcatcgagctgaccgacgtggccggtgtgccggatgaagagtatttcggcccgttgctgagcgttattcgctaccgcgagtttgatgaggcaatccgtcttgccaaccagacgcgctttggcctggccaccgggctgatttcggcgcagcgtgcacagttcgatcagcttctgctcgaggcccgtgccggtattgtcaactggaacaagccgttgaccggtgcctccagcaatgcccctttggtgggattggtgcctcgggcaatcatcgtccgagcgcctactatgccgcggattactgcgcctggccgatggcctcgctggaaaccgaccgtctggaacttccttccgcgctgtcgccgggaatcgattttggtcagcaagggtaaccctggctgtcactggagagcatgatgtctggatatgaagtcaattttgatggtctggtaggactcacccaccactatgcggggctgtcgtttggtaacgaagcctcgacgcgcaaccaaagcgcaattgccaatccgaagctggcggcgaagcagggactgttgaaaatgaaggccttggctgaccttggcttcaaacagggcgtactgccgccgcatgaaaggccgcatcttagcacgctgcgccagatgggatttgagggagtgatgcgcaggtgctggccaaagccaatgcctattcgccgcgcctgctctcgtcgctaagttccgcatcggcgatgtgggtcgccaacgccgccacggtatcgccatcggccgacagcgccgacgggcgggtgcatttcaccgtggcaaacctgaataacaagtttcaccgtgcgattgaagccgacaccacctcggctatcctgcgcgccacctttaatcatcgcgagcacttcgcgcaccatgctgcgcttcctcaggtcgcaaatctcggcgatgaaggcgcggctaaccataatcgactgtgcggcgagtatgacaggcagggcgtgcaggtgtttgtttatggccgtaacggactggtgaccggtgataacgaaccggtacgctatccggcgaggcaaacgctgctggcgagcgaggcaattgcccgtttacatcagcttgacccagtgcgcacggcgttcgttcagcagaatcccgaggctatcgatcgcggcgtattccacaacgatgtgatttcggtcagcaatcgccaggtgctgttccaccatgagcaggcatttgtgaatcagcaggcggcattcgacgaaattcgccgcaagatggccagcgttgaggcggactttaaaccgattgaagtgcctaagtcgcgcgtttctctcgatgatgccgtggccacctacttgttcaacagccaactgctgagcagggccgacggtaaaatgactatcgtcgtgccagaggaatctcgccagcacgccgcggtatgggactatctgtcggatctgcgcgccagcggcggcccgattgacgatatccaggtcttcgatttgcgtgagagtatgcgcaacggcggcggtccggcctgcctgaggctgcgcgtggcattaaatgctaccgagctgtcggcggttaatcagggttcactgattgacgatactctgtttgctcgcctcaatgattgggttgacagccactatcgcgaccggatgcagcaggaagatttagccgatccgcagctgctgctggaagtccgccgcgcgctggacgagctaacgcagatcctgcgtctgggaagtatctatcctttccagcaggcctgaagaaagtgattaaggaacgcgtgtcatgtttgatgtattaacgcttactttggacggaacgccgcctgttctcccctccggtcaactgccgcatcttgactggcagtggttggccgaaggcgtgcttgagctgtcgccgcgtcacgcctgtaaaaaggcggtggtgctgtcggcggggttcacggcaacgaaacggcacctatcgagctgctgaatcaactggtggccgagctgcttgccggtacgcgcccgctgagggtgcgtttgctggtggtgctgggcaatccaccgtcgatgcgtgccaacaagcgctatctcgtggcggacatgaatcgtatgtttggcggtcgccatgtgcgattcaccccaagtgatgaaacacggcgtgcgcagcagcttgagcaactgctggcgcagttttatcgcagcgccagtgcggccggcgccaggcagcgtttccattatgatctgcataccgcgattcgcggctcgctgtacctgcgttttggcctgttgcctttccagctgcgcccgcactcgcccgaaatgctggcctggcttgagcaggccgggttagacgcgctggtctatcatcgctcccccggcgggacgtttacgcactttagcagtgaggttttcgatgccgaaagttgcaccctagagctcggcaaggcgctgccgtttggcgagaatgaccttaagcagttcatccagataaagctggcgttgcaggcactggtgagtgatttacctgcgcccgcacgtcagggtgagccgatgaagcactttcaggtggtgcaggatattttgcgcgaacagccggacttccaactgcacgtgcccgccgatgcgctgaattttaccgcttatccgcagggctacgtgctggccgagcagagcggtaaaacgtatcgggtcgagcaccccgaagaagtggtgttattcccgaacccgaacgttgcactgggactgcgtgccggtttgatgctggttgaaatgtcttagatttgttattcaaagacctgactgcctgatttcattcacataaacaaaattgtgcgtgctgaaccggtgatgtgccaagctaagcggttcagcactttggtcgaatgaaatctcgtcaatgatcctctcggcgctaacttccttatttctaaatcgttgagggatgctatgatttcgtctaaggaaatcctttagattcgacaaccggtttgggaaataatgggctttaaagcgttgcaaaaatctgattgggtaaacttgttgatagccattcccgccgggattattgctgcgcttgtgacgataggatttcggctggcgatcggcggcattgatggcttgatgtttaaagacggcagcgacataacccgcgcgtttaacgaataccctctgattgtctggccgattatcaccgccgtgggtggcgtggtggcgggctttattctccactgggcgctccgctacgagtcgcgcaacggcaagatgccggactatctcgacgtcatcgataaacgcttaccgggtattcctgtggtcagcacgctgctgagatcgctctcttcacttgccagcatcgcgagcggcagttccattggtcgcgaaggcgcgatggtgcagctttctgcactgagcggcagcctgctgggccgctttacccgttttacctctcttcaccagtcagacgtggtggcgatggcggccgcaggcgggctggctgcggtgtatcacgcgccgtttgccggcgcgctgtttgtcgccgagattgcctttggtgttaccgccgtacagcggcttatcccactgtttatttccgcctcggttgcggtgctgactgtgcgctccgttacccactatgcgccgctgtacctctattcttccgccgtattcagcccaacgcccggcgctatctttaccgtactggcgattggcgcggcgaccggtattctcgggccgatgtttattgcctcaattgataaggtgcgcagggcgatgcagccgatatcccatccggcgctgcgccttggcctcggaggactggcggtaggcgtggtggcgatggtctcgccgctggtgctgggcaatgggttcgaggttatcgaccttatcctgaataaccgcgacctgcatacctcgctggggctgctgctgctgctcaagattgttgccaccgctatcaccgtagggtctggcgcggtcggcggcctgttcacgccttcgctgctgatcggagccgcctgcggcgcactggtctgtacctgcctgcaatggctgggctttgatccggggccgataggcctgtatgccgccatcggcatgagtgctttgctcgcggcaaccagtcacgcgccgctgatgtcgatcatgatggcgtttgaaatgaccctcaacagttcgctgctgttcccgttgatgctggcgacggccatttcctacgttgtggcgtcgcgcttcaaggccagcggtacctacccagtgttgacccggctcaacgcgcggttcgccgccaagagtgattttgagaacgggaccgtcgccgcgttgatgtgtccctgttcaaaaatgtacctcgatgccacgctggtcgagttagtcagtgagggcctcaaacagcgcacacgttacgtctatgttatcgacagggaagagcgcttcgttggcgtggtcgcgaccaatgtgctggcaaccggcatcattgacggcagcctggataaagaggcgcccatcgacccctatatcgagcatgaatttaccgtgctctatcagcagtcgagctatgaagaggcgtgggccgtgttcagttcatcaccgctcgaacgtctgccggtgctggaaaatgccgagacgcgtcgcctgctcggcgtcataaccaaggctgcgctgctcagcaaggcgaaagattttttgtaatccttttcctactcccaaatagctgaccacaactccaattcttaaatagcgctcaatcacgagcgctatttttatattttacaataggttaagaattttaagtttataccccctagggggtatgtttcgtcgccgtaactatttccttcctgaatcgattgatcgtcatcaacgcgtctgttcacacccgcgactaccctagcgccaatttaagcaatgtcattgcgttgatttttgcctgcaacgctacccaaataaagacagaacgcctcaggaggttcctggatgagcaagtttctagaccggtttcgctattttaagcagctggccgaaccctttgccgacgatcacggtcagacgctaaacgccaatcgcgactgggaagagggttatcgcagccgttggcagcacgataaagttgtgcgatccactcatggcgtcaactgtactggctcctgtagctggaaaatctacgtcaaaagcggcctcgttacctgggaaactcagcagaccgactacccgcgcacgcgcccagacctgccgaatcacgagccacgcggctgcccgcgcggagccagctactcctggtatctctacagcgccaaccgtctgaagtatcctctgatgcgcaaaaagcttatccagctgtggcgcgaggcgaagcagcagcatgccgatcctgtcgatgcatgggctcaatcgtcagcaatcctgaaaaatccaaaagctataaagtcgtgcgtgggcgcggcggctttgtgcgctccagctggcaggaggtcaacgaactgatcgccgcctccaacgtttacaccgccaaaacctttgggccagaccgcatcatcggtttttcacctattccggcgatgtcgatggtgtcttacgcctccggcgcccgctatctctccctgattggtggcgtgtgtctgagcttctatgactggtactgcgacctgcctccggcctcgccaatgacctggggtgagcagaccgacgtgccggaatcggccgactggtataactcttcctatattatcgcctgggctctaacctgccgcagacgcgcacgccggacgcgcacttcttcagcgaagtacgctacaaaggcacgaaaacggtggcgattacccccgattatgccgaagttgctaaattctgcgaccactggctggcaccgaagcagggaaccgacagcgcgctggcgctggcgatgggccacgtaatccttaaatccttccatctggataacccgagccgctacttcatcgactatgttcgccgctataccgacatgtcgatgctggtattgctcgaaccgcgcgaagggggacacttcgccgcaggccgcatgctgcgcgcctcggatctggtcgataacctcgggcaggaaaataatccgcagtggaaaactatcgcactggacgaacagagcggagaactggtttccccgctcggctccatcggctatcgctggggcgaaaaagggcagtggaatctcgaagcgcgcgaaggcaaaaatcagcaggacgtcaaactggcgctaagcctgctggaccaacatgacgacgtcgttgaggtcggtttcccgtatttcggcggcatcactcacgagcatttcaacagcgttgcgctggaagagatcctgctgcacaaactgccggtgaagcggattcttctcgccgacggcagtgaagcgtgcgttgccagcgtctatgatttgacgctcgccaactacggtatcgaacgcggtctcaatgacgccaactgcgcgcagagttttgatcagatcaaagcctacagtccggcgtgggctgaacagattaccggcgtttcacagcaaaatattatccgcattgccaccgagtttgccgacaccgccgacaagacccacggccgttcgatgatcatcgtcggtgcgggcctgaaccactggtatcacatggacatgaactaccgtggcctgatcaacatgctgattttctgtggctgtgtgggtcagagcggcggcggttgggcgcactacgtcggccaggaaaaactgcgtccgcagaccggctggcagccgctggcctttggtctcgactggcagcgtccgcctcgccagatgaacggcacctcatttttctacaatcattcgagccagtggcgctatgaaagcgttacgccacagtcgctgctttctccgctagccgacggctcacgctttagcggtagcctgattgacttcaacgtacgcgccgagcgtatgggctggctgccttctgcgccgcagctcaacgtgaatccgctgaatctggccgcgatggctaaaacggcggggaaaaatgtacagcaatataccgtcgacagcctgaaggacggcagcgtacgcttcgccgccgagcagccggatgacccgcaaaactacccacgcaacctgtttgtttggcgctcaaacctgctcggttcgtcgggtaagggccatgaatacctgctgaaatatctgctcggcaccgaaaacggcattcaggggaaagatttagggattcagggtggaatcctgccggaagaggtggaatggcaagaccagggcggcgaaggcaagctggatctggtggtgacgctcgacttccgcctgtcgagcacctgtctgtactccgatatcgtgctgccgaccgccacctggtacgagaaagacgacatgaatacttcggacatgcacccgtttattcatccgctgtctgccgccgtcgatcccgcctgggaatctaaaagcgattgggatatctacaaagggctggcgaaggagttttctcgtgtctgtgtcgggcatttgggcgtagagactgacctggtcacgctgccgattcaacacgactccgccgccgagttggctcagccactgggcgtggaggactggaaaaagggcgactgcgaacttattccgggcgtgaccgcgccgcatctggtgccggtcgaacgcgactatccgaatacctatgcccgcttcagcgcgctggggccgctgctcgacaagctcggtaacggtggcaaaggcatcaactggaataccgacagcgaaattgcgctgctgaagaaactcaatgacacccagcctgatggtgcagcggccggtcgtccgaagattgaaacggcgatcgatgcggcagaaattatcctgacgctggcgcctgaaaccaatggtcaggtggcggttaaagcctggaaagcgctggggaatttaccggcattgaccatcgccatctggcgctgaataaagaagacgagaaaatccgctttcgcgatattcaggcacagccgcgcaagattatctccagcccgacctggtcgggtctcgaagatgaacacgtctcctataacgcctgttacaccaacgtgcacgagcttattccttggcgcacgctgaccggccgccaacaaatttatcaggatcacgagtggatgcgtgcgttcggtgaaagcctgctggtttaccgtccgccgattgacacccgtgcgtctcagccgttcctgaatacgcagcctaacggtaatccagagagggcgctgaacttcatcaccccgcaccagaagtggggcattcactccacctacagtgacaacctgctgatgctgaccttgtcgcgcggcgggccgattgtctggctgagtgaagacgatgcgcgccagcttggcgtcacggacaacgactggatagaggctttcaacgccaacggttccttgactgcgagggcggtggtcagtcagcgcgttccggcgggcatgaccatgatgtaccacgcgcaggaaaggctggtgaatattcccggctctgaaatcacccaacagcgcggcgggatccacaactcggtaacccgcgttacgcctaaaccaacgcacatgatcggcggttatgcccatcagtcttacggtttcaactattacggcaccgtaggctccaaccgcgatgactttgtcgtggtgcggaaaatgaatcgcattgactggttagacggcgaaggtcacgacaccgtgcaggagaaagttaaatgaaaattcgttcacagatcggcatggtgctaaatctcgacaaatgcatcggctgtcacacctgttcggtgacctgcaaaaacgtctggaccagtcgcgaaggcgtcgaatatggctggtttaataatgttgaaaccaagccgggtattggcttcccgaacgactgggaaaatcagcagaaatggaagggcggctggatccgtaaaatcagcggcaggctccagccgcgtatgggcaaccgtctgcagctgttgggtaagatttttgctaatccttatatgccggaaatcgacgactactacgagccttttgatttcgactatcagcatctgcacaccgccaaagaggggaaacatcagccgattgcgcgtccacgttcgctgttgaccggcctgcggatggacaaaattgtcagcggcccaaactgggaagacgatttaggcggcgagttctcaacccgttccgccgacagcaatttcgccaacatacaaaaagaaatctacggcgagtttgaaaacactttcatgatgtatctgccgcgcctttgcgagcactgcctgaatccggcgtgcgtggcgacctgtccgagcggtgccatctacaaacgtgacgaagacggcatcgtgcttatcgatcaagacaaatgccgcggctggcgcatgtgcctgaccggctgtccttacaagaaaatctacttcaactggaaaagcggcaagtccgagaagtgcatcttctgctatccgcgcatcgaggcggggcagccaacggtgtgctctgaaacctgcgttggacgtattcgctacctgggcgtgctgctgtatgacgcagaccgtatcaagcaggccgccagcgtcgagaacgagcagaatctctaccagagtcagatggaaatattcctggaccccaacgatccgcaggtggtcgccgaggcgttaaagcaggggatcccgcagtcggttcttgatgccgcacagcggtcgccggtctacaagatggcgatggagtggaagctggcgctgccgctgcatcctgaataccgcaccttgccgatggtgtggtacgtgccgccgctgtcgccgattcagtcggcggccgatgcgggcgcgataccgcacaccggcgtgctgccggacgtcgaaagtctgcgcattcccgtccagtatctggccaatctgttaaccgcaggcgacacccagccggtgctgctggccctgaaacgtatgctggcaatgcgtcacttcaagcgcgccgagtcggttgacggcgtggtcgatactaccgcgctggatcaggtcggcctgagcgaacggcaggcacaggagatgtaccgctatctggcgattgccaactacgaagaccgctttgtggtgccgtcgagccatcgcgagctggcgcgcgaagccttccctgaaagtaaaagctgcggcttcagtttcggcgatggctgccacggcagcgacggaaaatttaatctgtttaacagcaagcgtatcgacgccatcgacgtgagccctaaaacctcgttcggagctgaaaaatgatcgccttacgcattatctctcgtctgctggactatcccgacgacgcgctgtgggcgcataagcaggacctgctgctggcgttgacggaatccccactgctgagccttgaagaaacgcagcagctggccgatttcattcgacagttttgtgccgccgacctgctcgacagacaggccgaatactgtagcctgttcgatcgcggccgcgccacttctttgctgctgtttgaacacgtgcacggtgaatcgcgggatcgcgggcaggcgatggtcgatcttttggatcaataccgcgccgcgaatctggagatagacagcaaggagttaccggactatctgccgctgtacctcgagtatctcgctatgcttgcagcggaagaggcccaagccggtttgctggacattgccccaattctggcgctgctgagtgcgcgcctgacccagcgtgaaaaccactatgcgctgttgttcaacctgttgctgagcctgtcgggtgccacactgaccgccgacagcgtggcggaaaaactgcagcacgagagccgtgacgatacgcctcaggcgcttgatgcggtgtgggaagacgagcaaatcaaattcctcggtgagcaaggttgcctgagtgaagaagaaaaggcacgcggccaacgttttgcaggcgcggtagccgcgcagtacattcaactcgatgccggacaccccggcgtctcccgtgaggagaaacgtccatgaatttcctcagcagcttcttttttgatatttatccgtatattgcggggacgatttttctggccggcagctggctgcgctatgactatggccaatacagctggcgtgcaggttccagccagctgctggataaaaaaggcttacgcattgcctcgccgctgtttcacgtcggtattcttggcatctttttcggccacctggtcggcatgttaaccccgcactgggtttacgaacctttcctctctattgccgcgaaacagcagttggcgatggtcgtgggaggcatttttgggctgatgacgctggtcggtggtgcgatgttgtttaagcgccgcttaaccaatgtgcgggtgcgcgcgacctcaagcgttggcgatatcatgataatcgcgctgctggtggtgcaggtttgtctagggctgggcaccattcctttctcggcgcagcatctggacggcagcgaaatgataaagctggtcggctgggcacaggccattgtcaccttccagggcggcgcatcggcacatcttgatggagttgcgcttatcttcaggctgcatatggtccttggcatgacgctgttcctgctgtttccgttctgtcgtctggtgcatatctggagtgcgccggtggaatacctcactcgtcgttaccagctggtgcgtaaccgccgttaattctcgctaccgttaacctccagatgctcttctcccactctgctgaatattgtcagcgagaaggggagaagagcgcgattaccctctcattctctgcgatcgttattaatatccctttcctggccttgtttgttatttgtgcaaaacagtcattatcaatacggagtattgttcaaattaataaccaaggtaattatgatcctcttacgtgatttgtaatttgacttaaataatcctctcggtgggaataataaatattaagtcgatagtcaaatgcggtatttgcttaactggattttcgatatagcagaggaataataaaaaacgcttactctgctatgcactttttaaaggcaagtgatctatttctcatttaatttttttaatgattgttaacacataaaaatgctttgaaaaacgtgctctatagcacagtaaaaagacaattctttaagaagtttgcaccaaaaaacgcgcacgcactattttggtgcaacctgttatgcaaaatatgcataaaatcagggggttacaaacctgattttgaatcattttgtaacatatcatttcgataatttaaccaatagcgccgaactttttcattttaacttttcgtgcttagtgctaatgttcgattcgatttacagatagcagcaattataaatattaagaaactcgcagcctgatatttaaaatttggcacggggaaacctatatataaaattctaggaacttaaataatgatgaagcgcagtgttttggccgtagcggtctctttaattgtcgtaaccactggtgcaaatgccgtagagatttataacaaagatggcaaccagttggatctgtatggccgcgttaacggtaaacattatttcagtgacagcaccagcaacaatggcgatggttcttatatgcgttttggctttaaaggccagaccaaaattagcgatactctgaccggctacggccagtgggaatatcaaaacagcctgagcaactccgaaggttcagacgcgctgaacggtaacaaaacccgtcttggcttcgccggtctgaaattcgccaagtttggctcattggattacggccgtaactacggcgtagtgtatgacgcaattggctacaccgacatgctgccagaatacggcggcgactccggttacaccgacaacttcatggtgggccgttctaccggtctcgcaacctaccgtaacagaaacttcttcggcttggttgatggtctgaatctggcattacagtaccagggcaaaaacgaagcgaccagcgtatcaagcacctcacgtcctaccagccgctctaacggcgacggtgctggcgcgtctctgacctatgaagacatcggcggcaccggtatcggtgtcgcattggccggttctcgttctgaccgtacgactgctcagtctgaagcaaaaatcggcggcggcgacacggcttcagcctggtctgcggcggttaaatatgacgctaaccagttctacctggcgaccatggttgaagaaactcacaagcaaaccaacatcaccgcaaacggtgtagccggttttgccaacaagacgcagatctttgaagccgttgcacagtaccagttcctgaacggcttccgtccttcactcgcttacgtgtctaacaaagcgaaagacgtcgaaggcgtgggcgatgcgtacctgtacaaatacgtttctgttggtgcttactactacttcaacaaaaacatgtacacctacgttgactacaaaatcaacaaactgagcgatagcgacagcagcaaactgggcggcaacaagaaagacgtgaccaccgtcagcctgacctaccgtttctaagcttcagaaacgacgcgttatcaccccccgtattacccttatctgtgtctgaaaaggtaatctcaaaggcagggccgtctggctctgcctttttttatgctgaaaaaaaccttcccattcaactatctgctgtttttctctccccataacctcaggttataccccctgactaaacaagtattcgccgtggggcggcgcgcgtgaaatagtcgtgaggtcaggcaatcgaggttgcccaatcctacaactattgacgagagaaactcatgcaacaaatccctatgccgtatctgctgttcttaggtgacgtgatggacccgctggcggcgaaaacggcgcgcggcattcacgtctggcgtcccgagtcctgcgtgggccagattcgtctggcgaccgattccgtgtcactgggactcgaggagctggacatcgcgaccgctaaagcgcgcggcgcgaaaacgatggtgctgggcaccgccaacgccggcggtaagctgccaggccactggattgattcgattaaaacggccatccgcgccggcatgaacgtcgccaacggtctgcatcaggggttgaacgatattcctgaactggttgaacttgccgccgaacacaacgtgcaactgtttgacgtgcgccacatgcgccctgaactggacgtcggcagcggcaagaagcgcagcggtaagcgcattctgaccgtgggaaccgactgctccgtcggcaaaatgtatacctcattggcgctcgaatcggcgatgcgcgagattggcatgaaggccgattttcgtgcgaccggacagaccggggtgctggtcgccggtgcgggcattgccatcgacgcggtgattgccgacttcatttctggtgcggtggagtcactttccccggccaacgacgacgaccactgggacatcatcgaagggcagggatcgctttatcatccgtcgttcgccggggtcagcatgggccttatccacggggcgcaggcgcatcttctggtgatgtgccacgagcttggccgcaaacacatgcgccacctgccgcatcagtttatgccaaccctaaaacagtgtgttgataccaacctcgccgccgccagcctgaccaatccagacgttcaactggccggtttctcgctcaatacctccggcgtagatgaagccgaagccaaagccgcgcttgccgaaatcagccgtgaatttggtgtgcctgccactgacccggtgcgtttcggcatcagtgagctggcacagtcaatcaaggaccgtggcttatgattagcatggaattcaggacgctggagctgcctttggcgcgaccttttgccatctctcgcggtgtgcgcacggcggtgaccgtagtgcgcgttaccctgaccgagggcagccttgtcgcgatgggcgagtgtacgccgaccgcccattatcaggagtcggcggaaagcgtctgcgaacagctcgccgtcataaagccacaggttgaagccggtttaacgcgtgaagcgctgcaacaggcgctgccggtaggctctgcgcgtaatgcgctcgactgtgcaatgtggcgtctcgatgctgcaaaacagggcaagacggtctggcaactgcttgatatgcaagcccctcaaagcgttgtcaccgccgaaacactgagtctcgatacgctcgacaatatggcaaaagcggctgcaaacgccgtgtcacgtggggcgaaactgctgaaaatcaaactcgatcgtgagcagataatcgagaaagttgccgccattcgtcacgctgcaccgcacaccacgctggtgatcgacgcgaacgaggcctggctgggtctcgatctcgaaagtctgttccatgcgctgcacgaatttaatatcgcgatgattgaacagcccttacctgccggaaaagataaagacttggtgcgttgtttgcatcccattcctatctgcgctgatgaaagctgccatcagcgctcggatatcgccgggctgcgtgaccgttacgagatgattaacatcaagctcgacaagtgcggcggcctgaccgaagcgctagcgatggccgctgaggccaaggcgcttggcctgcgcctgatggtgggctgcatgctcggctcttcgctggcgatggaggccgcgctgccggtggccgtgcaggccgagcgcgtggacctcgatggtcctatctggctggctcaggactctcaaccggcgctgcgctacgagcacggtgaagtctggctttaaaacgtcttgaaatgaacagaggagcacgtttttgatgactgaaatgcccgtgagtgaggcgcctgccgtcgagccaaccgacctgtcagtgtcggaaagtcccatcaggcccattcttcaggttaaggatttatcggtcagttttagcggccgacaggggaagactcaggcactcaaaggcgtctctttttctattaataaaggtgaagtggttgcggtggtgggggagagcggttcgggtaaatcggtaacctcgttgggcatcatggggctgctggccgattcggcaaccatcgatgctggaagcattgattttactacccgtagcggcgcgaaacattcactggtcaagatggggacggaggcacggcgtaggttacgcggtcaggaaatgtcgatgattttccaggagcctatgacctcgctcaacccggtgctgcgcgtgggtgatcagctcaccgaaggcctgattgaccacggcatcagtaataaaaacgatgcgttgaacaaggcgcgacagttgctcaaacaggtgcgcatccccgacgttgagcgcattttgagctgttatccccacgaactttccggcggtatgcgtcagcgcgtgatgattgcgcaggcgctggcctgcgaccccgcactgttgattgccgacgaacccaccaccgcgctcgacgtcaccgtgcaggcgcgcattctgcaaatcttgcgtgatttgcagcgcggttcagacatggcggtgctgtttattacgcatgacatgggcgtggtcgccgaaattgccgaccgcgtggtggtgatgtaccacggtgaggtcgtggaggagggccgcgtcgagcagatttttgcccacgcacgacacccttatacccgtgcgctgctggccgcggtgcctaaactgggcgatatgcgtgggcggcagtggccacggcgttttccgttgattaaaaaagacgaatcggcgctggctgatgtggccggcctcgatgcactcgatgagcagacgaccgccgattacagcgtaccgcccctgctcgatgtccgtggccttcgggtcagctaccccattcgttccggcattctctcgcgtattacacaagaagtgcacgccgttgaacagatagatttctccatctggcccggcgaaacgctggcgctggtgggcgagagcggctgcggaaaatccaccaccgggcgcgcgattctgcgactggtgggcagccaatcggaaagcattcatctcgaagggaaggaaattaccctgatgcgcgacaagccttttcaggcggtgcggcggcagattcagatggtgtttcaggacccctacgcctcgttgaatccgcgcctgacggtcggtttttcgatagctgaaccgctgctgctgcacgggctggcgcgctcgctcgccgaggccacgccgacggtcaataaactgttgaaaagcgtgggcctcgagccgtcagttgcccgccgttatccgcatgagttttccggcggacagcgtcagcgtatcgcgatagcgcgggcgatggcgctacagccgcaggtgattatcgccgacgaggccgtctcggcgctggacgtctcaattcaggcgcaggtggtgaatctgatgatggatctccagcgcgataccggcgttgcctggttgtttatctctcatgacatggcggtggtcgaacgcatcgctaaccgcgtggcggtgatgtatctcggacagatagtcgaaatcggcccgcgcgacgccatttttagccatccgcagcatccttacactcaacgtttgcttaactcggtgccgattgccgatcccacgcagcgaacctcgcgcagttttgacgataccgaagtgaaatcaccggttcacccggtcggattacagatagagaaagtgaagtatcgggaagtttcaccacaccactgggttgctctagatgtccctcgtccttgacgctgccgctgcgatgggctcgttcgctcacggccttgctgtagagctcatgacaagggcatttgtttatttttaattgtttttacattccgggacacacaggagaagttcatgcattcgatgttaaatcgcaagacattactggccgccagtctcacgctctgtttcgctacctcggcgtttgccaaggacctcagtatctcgatgtatgccgacgtgacgggctttgacccgcacgataccaccgacacgctgagctattcggtgcagaccggtatcttccagcgtctgtttgaatttgaccagagcatgaaagtcatcccggtgctggcgaccgactacaccagcaacgattcggcgaccgagttcaccattaatctgcgtcagggcgtcactttccaggacggtacgccgtttaatgccgatgcggtcaaggtcaacctcgatcgtctggccaatcctgcgaatcaccttaagcgtaattccttgttcagcatgattaaaaatgttgaggtgaccggcccttatcaagtcaaaatcttcctcaacaaacctttcggtgcgatgatcaacacactggcacatccttctgcggtgatgcacagcccggcgtcgctgaaggcttatccgaacgaggccgacctcagcgtgcatccggttggcaccgggccgtttaagttcgttgaatggcagcagggcaaagacgtcaagctggtgaagtatgacaactactggcagaaaggctggccgaaggtggactcggtgaccttctacccaacgccggaagactcgacgcaggtcgcgaagctgaagtctggcgcggtgcaggcggtgtatccgctgccgtcagacttggtcgataccgtgaagagtgaccctaagctcgatattcagcgtgacccggtatctacctttattacattgcgtttaacacccagctcaaggagtttaaggaccctcgcgtccgtcaggcgattaactacgccattgatcgcaacctttggctgaaggtcggttttgccggtctgggtgaaccttcaacctctccgctgccaacgcacgtacagttctaccagaaacagacctcaccggattacagctataacctcgctaaggcaaaagagctgctgaaggaagccggttatccaaacggcttcgacgttgaaatgtggagttcgaataaaaccgaccgtattcgtaccggccagttcctcaagcagcagctggggctgattggcgtgcgcgttaagcaggtcccgatggacgcaggcagcatcacgcaaaaactctggagcacgccgaatccggcggacgccaaggtgcagatgtactacggcgcctggtccacctcgacgggtgacgccgactgggcgctacgtccgctgtttgcgaccgaatcctttattccaaaaggctacaacgtctcctactacagcaacaaggccgtggatgccgacatcagcgctgcgctgcaaaccgccgacatggacaagcgtaaagccgcctatgacgacgcgcagaaactgctgtgggccgacgcaccggttgcctatttaggctctcctgacaacctggtcggtaagaccaaagatctctccggcgtatttatgctggcagacggtacgctgctgtttaatcaggcgcagttcaaataatcgatgcagtttaattacgggcgaaatgtttcgcccgtaatgcgtttttagcgacagattggtggtcattggttattgaggaacaggatttatgctgacatattttatccgacgaatactggaaatgatcccggttctgctggtggtgtcattattgatatttggttttatcaagctgctgccgggtgacccagcgcgtatttatgccggtcaggacgcaacgctggcggcggtcgagtcagcgcggcaactgcttggtttaaacgatcctcttccggcgcagtattggcactggataagcggcgtgtttcacggcgatttgggaaccacctatcgtacgcgccagccggtattgagcgtgattgaggccgggtttatgccaacgctttatctggccatggccggctttgcctggtcggtggtgcttggcctgattatcggcgtttgggccgcgctcaagcggggaaatggcaggactggacgctgatgagtttcgccatcggcggaatttcgatgccccctttctggcttggcctgctgttaatccagtttgttgcgatgccgtttggcatcttttcagtcagtggcttcaacaagccaagtgacattattttacccgctatcacgctgggttcatcggtggcggcggtgatggcgcgctttacccgttcggcgtttctggacgtggcgcaggaagattacgtacgcaccgccaacgccaagggcctgcgggcgcggctggtgacctggaagcacgtgatgcgtaatgcgcttattccggtgataaccatgctcgggctacagttcggttttctgctcggtggctcgattatcgtcgaagccgtgttcagctggccgggtctgggctggctgcttattcagtcgattcaaacacaggaccagccggttattcaggcactggtgatgctgtttgtcttcgagtttattgtgattaacacgctggttgacctgctttatgcggtagtgaacccggcgattcgactgagttaggagcaacgatggtacaacccgccaataccctaccgcagctggaaccggcaccggcgccacaccgcactgccgatgatatccgctcgccgtggctggattttttccagtctttcattcgtcatcccatggcgatcgtctcgtctatttttattcttttactgctgatggtggcgatttttgcccctgcctcgcgccttatgacccacagacgccggactggatggctctcggtgccgggccttccgctgcgcattggttcggcacggacgatctcggtcgcgacgtgctcagccgcatcatctacggcgcacgcatttcactttacgtcggtcttttgtcggtgacgctggggatgatcctcggagtcttcctcggcctgctcgccggttattacggcaaatggctcgacatgctgattatgcgcggctccgacgtcctgtttgcttttcccggcgtgatgctggcgattgccgtggttgccattcttggccccggcctgaataacgtgatcattgccgtcgcggtgttcagcgtgccggttttcgcccgcatcgtgcgtgcctcgacgttgtctatcaagcagagtgcctatgtagaagcggtgcgctgcgtcggtgcgcctgaccgcgtggtgctgctgcgccatattctgccgggtacgctgtcgaacgtgattgtttatttcaccctgcgtatcggcaccagtattctaacggcggccagcctgagttttatcggccttggcccagagccggacgtgccggagtggggcaacattctggccatgagccgtaacatgatgatggcaggaaagtggaacgtgagcgtatttccggggctggccatttttctgaccgtgttggcgtttaacctgttgggtgacgcattgcgcgatacgcttgacccgaaactcaaaaaataaatcaccgtctttcctggcgctacggcggccatgactaagagggtgttgacagggagataagatgtttgcggatgattttaaccagcagggcgtggatgccttgctggcaagatggcgggcgcagcggaagatttttaccccgcgtttccctacggggctaacaaccgcatcagcgacgtggtcggggtgaccgtgggtcatagcaccctgagcgaaggggatattcagacgggggttactgctatcgttccgccgggcggcaatctttatactcatccgttaccctgcggcgcggcggtgttgaacggctttgccaagccgatggggctgacgcaggtgagggaactcggcgagctgcaaacgccgattttactgggaaataccttctccgtgggcacgttgttcaacgcgatggtgcgccagagctgtgtcgacttcccgcagattggccgaggcagcgcgaccattaatccgctggtgctcgagtgcaacgatgcctttctcaatgatattcaggcgatggcggtcgatgaacggcacgtgctcgaagccttacggtccgcgaggcccgagtttgcgcgcggcagcgtaggagcagggcgaggtatgagctgcttcggccttaagggcggcgtgggaacggcctcgcgatatcatcaatccctcgatgcccatctcggcgtgctggtgctggccaactttggcgtcttgtccgaactgacgcttgacggcgtgcgcatcggcagtgaaatcgaaagcatattgccggatcttgcgccgcaggtcgatgcgggttcaatcattattatcatggcttgtgaccgtcctctcgacagccgtcaactgacccgcatcgcccgccgcgcgggagcggggctcgggcgacttgggagctactggggcacggctcaggtgatatcgcggtggcattttctacccgtcgtgaaggcaccttactgcaagacgatgacctcgaaccgctgctggcgatggccgctgacgccaccgagcaagcggtgctcgacgccatgctggccgcagacacggtggttggattccagcagcaggctcggctcggtttaaccgccgttttagactatcttgtgacacgtaagggatgatgagataacccatgaaagtatttatatcggccgatattgaaggtatagcgggcgtcatgcgccctgatcagtgcagcccgggcaacgtggaatatgaaactgcccgtggcctgatggagcaagaggtcaacgcggccattgccggtgcgttcgagggaggtgctgtcgacgtggttgtcgccgacagccacgcaatgatgcagaacctgcgcgccgcgaatatcgacccacgggcgcgaatggttcagggtaaaccccgtggactctcaatgctcgagggactccagcagcagggcttcgacggcatgatgtttgtgggttttcacagtgccgccggtgagatgggcgtgctggcgcataccatcaacggccgggcgttttatcgtatcaggattaatggcagtatcatgggcgagaccgacctctacgcggccgtggggctgagcttaacgttccactgtggctggtaaccggtgacgaccagcttgagcagtgggtaaaccggctctatcccgagactgactacgtttgcgtaaaacgcgcaatttcagccaacgccgccgagtcactaagcccgagttcgcccgcaacaaaattcatcaacaggcggcagacagcgtccgcgcggcgtcaaagcgcatcgaaagacgtttttccgcgccgtatcatctcgaactcatggtcgccaaacccgtactcgcagacctgttttgcctggtccctggcgtaacgcgtctcgacgccatcaccgtcggctacaccagtaaaaccgttgccgccatcatcagcctgcttgccgcattttcatacctcgcgtcgacgcagaagtgaggtgagatattgggctctaaatgactggagcccatcacgcaaaaggactttcctacttataagctgacgctgtttgtgtcaaaggctcactgaataagtatatgtcatctaaggagttaattggatgacgtgtttcaattttattagaatcaaaaatgcctatgtacatttggctacggtttaaatgaagcctgcaaaccggttttctattattatcatcaataagaataccgaaataactcttggtatcacggtaagtcactctttctgctgcaattaccgttcgaattattgattttacaatatgatagccttcgatctcttctggtgtcgtgaccacgccattttcttctttatgaacactctctttatcttctgctgtttcaacagaggcttcttcttttggggttacctgaacattggcactaattgccgatttaagcctttcattgacttggtcatttagccattgcgtgagagattttttcgtaagcgttaaaaaaagctctcggactttttgtgttaaaattccgtcatatactcgcgaggctatgagtctgacgaactcatcttcagggttttgaaattgagaagatatgattttctttatctgactgacatattttaattcgccagctgcattaacaattgactcgacgtcaaatgcacctttcgtcaactttaacagttcagggacaacgttatgatcaatatcgagcaggtccagctctaagaagggtttttcatccattttatttggagcatcaaggtctgtaaaaaatttatagacttgaccattagtgagaatggaaattcttgcgcttgtaacatgaaaatacctaaataactgtgaggcatgattaacattcagcagctcaccaattttcttgcactctataagtatttgtatttcattgttttttattattgcgtagtcaattttttctcccttcttagttccaacgtcacagatgaattcagggataacttcgagagggtcaaacacatcataacccaatatttgatttataaatggcatcacaaaagcgcttttggtggcctcctcagtctggataagagaggcctgctgttttactttgtctgagagtgagtttaacttttctaaaatttccatcgttcaccattattttcaggttatcttcggggaatatgctggttatgattagaattaaactttagggcgaatgacttttaatttttttaaaaaaatgttttactacggcttagtcagtatagaacgctaggctaaacatcttaaaaaatatccatgaaatgtttttatttgtcaatccaatccagaggaggcttgtctttttttgaccttactcaacctatttcgtccatttatagagggcgaactcaagttatagagaggttattacaggtcggcttggcttttaggtttaaatttaacatctaaaagataaacttactttttttcctattgtgacgtttttgtagtttatagacgggcactcttaataaaagattttatccaactagtaaaacacttaatgtttatctgttctgcatttgctaagtctagcccgcatcaatcaggccttctaatagctcagggctcttatggcttatttttctctcctcaacgggtaagttagatgattacttgacgaaacgatggcttaagaatcatgcaagttcatattgatgaagagcggccagtgcttaatttattcgatgcaaacaccttctctgtgctcatacattgttatcctagacttgcggtgagggcccttgaacatctccatataggcaaacagataaaatctcaggttcagccaggtttcacccgggggggtatttttgttataaggcttgataaagtcggcaaaagccagtgtattggtgacatttagccttaaaggaaaaagccagcatgcgtttgcgtcatattgaagtgtttcaggcggttttgcaggccggtagcgtgagcggtgcggcgcggttgctcaacgtgtcgcagcccaacgtcagtcgtgtgctgaaccacgccgaacagcagctaggcttcaatctttttgaccgcacgccgcaggggctggttatcacaccggaaggacgtcgtctgatgcctgaggttgaggcgctgtttagccacattcaggcgattggttttctggcggagcaactccggcagggagaagggcagcacgttagaattggctcagcgcacgcgctggggcatagcgtaatggcgccggtgctggtggactttcaccgcaagacgcccgctggcagcgtcgaactggtgaccggacacttcaataccctcagtcaggacctactacagtataaaatggattttgctctggcgtttggcgagcaggtctccgccgagctggtatccgagacgctgtatgccgcgaatatggtcgcactgctgccgctggacttttcggttgaggggccggttacgctcgagtggctcagcgaaaataatttgttaatgctacaacagcaggacccgctggggcaggtgctcaatcgcgtgctccgtgagcaggggcttaccccgcaggcctcgctgcacatcaaaacctattccgttattgccgacatggtactggccggagggggcgtcggcgttgtcgacaccttcaccgcccagcgctatctccatcagctcaagattgtgccggtagtggattcattgccgttcgaggttatccttctgagccgccgtgatcagccgcagtcgcaggttgggctggcattgcagcagttgatccgccacaagctgtgggagctctccgataagccgctaggttgatgagccagccacaataactgtctgtttcaacagtataaaaaccacatagattgcaacattttggggcattttttgccgataaatgcgggtcgccaaaggcgtctggacttgaatttctgccctcgtccggtaagctaaccccttaatgacaaaatgtgtggactatgacgaacgtcacagcaaaaattttccattttgataagcgtttgctttgcctctcggcgttagccgtcggcattgggcttaactgtgccttgatgtcgttcagtgcccaggcatttattactgattccgccttaacgcttaatcctgacgttgattatgcggctcctgcatcggacagtcattctcccttcaacagcgcagcatccgattcaaaccccaatgccttgcccgatttgggcagttcggtgaagaatggccagagttcgcagacgcaggtcttcgaaaccaaagttgcgaccacccttaaagagtttggtgagaccaccagcaccagcgacgatccgctgcgcgagggggccgagaccctagccctacagcaggccgcgcgtctggtgaagcaagagacttcgagcctactttctcctctcggcaccacgacaatgaatatcgacgtcagcggcggtaatctcagcggcagctcggcggctttgttaagtccgctttactccagcaagtcgttactcacctacagtcaggtaggaattcagcacgtgagcggggcggacatcggcaacttcgggctggggcagcgttggtcgcgcggcgcgtggatgttgggctataacgcgtttatcgacgatgattttgtcagcgacctcaagcgtggcagcgtgggcgcagaggcctggacagattacctgcacttctcggccaactattatcagccgatttccgggtacagccccgagtcggagaacgcgactaccctgcgccgtatggctgccggttacgatattcgtacccgcgcctatttgcctttctatcgccagattggcgctacgctgacctaccagcagtatcgcggtgaccacgttgacctgtttggcgatggtacctatcaaagcaacccgtcggcgctttcgttgggggttaactatacgcctgtgccgttgtttaccctgagcgctgaacgtcaggaagggcagagcggcgataaccaaaatctgctgcaactctcgttgacttacaagctgggcgtgccgctgagtcagcagctttcccctgactacgtgtccgacagccattcgctgcgcggcagccgttttgatacagtcgacagaaacaatattccggtgctggagttccgccaacgcaaaacgctgtcggtatttttggccacgcctccgtggaccttgcagcccggcgagagcctgccgctgaagcttgagatccacgcggcaaacaaaatacaggcgctaagctggcagggcgatacgcaggcgttgagcctgacctcggccaagaccaacagtgaccccgatggctggacggtgatcgtgccgaagtgggacgacagtccgaatgcgaataacacctatcatctgtccgtgaccgccgttgacagcaaacagcagcacgtgacgtcaaactggataaccttgaccgtggcaccgccgccgcttagcgcttatccgcaggaaccggccctgagtttcagcaacgacaataacggcgacgactgagcctaaatatggttgctttgcaagacccagacggcggcctcgacgcgcgatttcagcttcatcttcttcaataaatgcttcacgtgaactttaaccgtgctttcggtgatgttcaggcgtctggctatcatcttgttaggcaagccctcggcgataagcttgatgatgtcgcgctctcgcggcgtgagtgactgaatatcgcgctcggtgctggggcgtctttcgcgcaggctggcggtcagtaccggcgttaacgcctcgctcagcaccatcttgcccgcggccgcatggcgcagtgcaatcagcaaatcttcaggctccatatctttcaacagatagccatcggccccgcgtttaaacgcggtcactacgtcgtcttcattgttcgagacgctaaagaccacaatacgacccgacaaatcggtttcgcgcattttatcgagcgtatcaagtccgttcatgcccggcatgttgagatccagcaggatcaggtccggatcgagggttcgtgccagttcaacgccctgttcgccgttattggcttcgccaaccacctgcaggtcgctgtcgagggcaataagctgtttgacgccgttacgtagcatcggatgatcgtcaatcagcaaaatagtggaaggcgttgggtcactcatcgtggctcctgtggagtaaagggaaggggatcgggggagaagtttacgcacaccgtggtgccgccgccgtcgcgcgcatagatgtggcattcaccctgaaggctgcttgcacgatcctgcattatcatcaggccatagtgattctgccgcgaggcgatagcagggaggccgaggccgttatccgttattttcatggtcaccgcgccctctttgtagcacaggctcagcgttacctcgctggcatgggcatgcttataaatattgttcagcgcctcgcgagcaatgtgcagcaggtgcacgccctgattggccggaaccagctgcggcggaagctgataatcaaacgtgatcgccagttccatttttttagagaattcatcgaccgtatgttgcagcgccgatcgcagccccgggtttctagcttgagccggaaggtggtcagcagctcacgtaattgccgatacgcggtgctcagctcttcgcgcatctgtttgataagcagctggctatcttcattgagcggcagattttgcatttgcaaacaggccatctgaattttaagacaggagagcgactgggccagcgaatcgtgcagctcgcgagcgatggtcgaacgttcttccatcagcattagctgctgctgattatcggtttgtctgtcgagcgtaagcgcgctggcgagctgttcgagcagggtgccaatcaactgtagctgatcctgagacagctgttggtctagaggaagctgggccagcagcaaaccatagttaacgtcaccgtcgcgcagccgccaactgagcggataggaatcttccagcccgcagcctgcttctcggtctccccattccagccgctgaggttgtgatttctggctatcaatctcgtggaaaaactcggcgctgttgttatcgtaaaggcgaacctgaatcgcacgcagtggcgtcagtttttgcagctcctgtaacaccggcggcagcttttgctcaaggttttgattggtatgcagccgttgactgacgcggtagaggaagtccagcgtctggtttttcagctgtaggctggcggttttctcctcgacgcgctggcccagattttcgaccatttcggcaagcgcctgcgacatgctgttcagcgactccccgagcacgtccatttcgtttcttaacgcgctggcaccctttgaacggcgacgatagcgcaggctgaaatcgccctgcgtgatggcattggcctgcgtgaacagcagctgccagggtttactcagacgctgacgaagaaaatagatggtcaataataggaacagcaacgtcaggatgatgaatacggtttgcaccgccgtaatcagtatcaggtgacgctccgtcttgtggtcgaggtcggcgaccagtccgtcgatgcgacgaacgaactccgtcaccgcagctttcgcctgttcgggctgatgcgcctgcagaagctcaggcttgagatacagctgccagtaatcaagtatggaagcgtattggttttgcagtccttcgcaggcaaccacctttgaaagctcggcgttgttctggtcattctcaatctggcgaatatcgtcgtcattctggggcgtgagcggtaattcggccagcagtcgataggcctgcatgcgcagtgagcctgccttgttaatggcatgggcgttgccctggatactttgcgccatccaggaggcaatgctcattccggtgatgccaaacaggccaagaagcagcatgaacagggggatttgtttgaccagcgacaggcgagtcagtgcagatttaatcatggtttcctttcccgcagtttcgggctgggcgcattctttaccatctttagagcgaaccctatacctataaagtattacttgggccattacctgtggtcccgttgatacatatcaagaaccgcgcaggtcctactccctaatgtgcacgccaatcgtacgacttttttaggttgaggcacaaatgactgacacgacatcacaccccgcggcaaaaacgcccaaagtaattaaagattggaggccggaggaggaggcgttctggaatcagcaagggcaacgcgttgctcgccgtaacctgtggatttcagtgccctgtctactgctcggattctgcgtatggatgctgttcagcgccgtcgcggtgaatctcaacaaggtcggcttctcatttactaccgaacagctgtttttgctgactgcgataccgtccgtttcaggggcaatcctgcgcgtcccttattcctttatggttcctctgttcggcggacgtcgctggaccgccatcagcacggtatttctgctgttgccctgcctgtggctgggcttcgcggtgcaaaatccagagacctccttttcaacctttctgattatcgcattgctttgcggttttggtggcgcgaactttgcctccagcatgtcgaacattagcttcttctttccaaaagccaggcagggcggtgcgctcggcatcaatggtgggctgggtaaccttggcgttagcgtgatgcagctggtcgcgccgattgccgtttcggtgtccctctttggcctgttcggtagtgaaggtaagtcgctcgccaacggcagtacgctatggttacaaaacgctgcctggatctgggttccgtttctggccatcgccacgcttgcagcctggtttggtatgaacgatatcgcctcttcgaaggcgtcaatccgccaacagttaccggtgttaaaacgcggacacctgtgggtgatgagcgtgctttatctggcggccttcggctcttttatcggcttttcggcaggctttgccgtgctgaccaagacccagtttcccgaggtcgagatcatgcattacgccttctttgggccgtttatcggcgcgctggcgcggtcatgcggcggtatgctgtctgaccgtctcggcggtgtaagagtgacgctggttaactatgtcttgatggccgtttttgccgcgctgctgttcctgacgctgccggtcaacggtcagggcggtcatttcgttgccttctttgcgctatttatggcgctgttcctgacggccgggttgggcagtggctcaacttaccagatgattgcagttatattccgtaaaacgacggcagaaagggctttagcgcagggtaaaaccgccgaggtagcacagcgcgaagcggtgactgatacggcggcggcactgggctttatttcctcaataggtgctatcggtggcttctttatcccgcaggccttcggcatgtcgttggcgatgaccggctcaccggcgggagcgatgaaagtcttcctgctgttctatgtgctctgtgcggcgatcactttttacgtttatgggcgtaaaggcgcaaaatagcggcgttaacgggcaagtttagcgttcttcttccatactctttgaatggttatttctctccgttggagcgttatgttcactcatcgattagtgtttccagccagcgtcctgcgtggacgaggcgcaataaagcatctcggtgccatgtgtggccgactcgggcagcgcgcgctgctggtgggaggggagcgcggcattgccagcgtcgaggagcaggtggccgaacagcttgaccagcaaatggtcagctatctcgggcatgacatgctcactggacagtgctgtgaggaagagattaagcgtctcgccgaccggctaaaattgcagggcgtcgaggtggttgtggcgaccggaggaggaagggcgctcgacaccgccaaggcggcgggcgtgctgtgtaatattcccgttgtcacgctgccgagcgtcgcaggaacctgctcggccgttacgccgctggcgtttcgttatcacagcaatgggcagtttcgtgatatgtatccgctggcgtacgggcctgccgcggtggtgattgacgccgacctgctggccacatcaccgctgcactggctttccgccggactcggcgacacgctggctaaatggtatgaataccgtgccattagtgacctcggtcaattgaccggattgtctggtgtggcgcgcaccaacagcgaactctgttttacgctcatcaagcactatgctgctgacgcctgcgaagcggtaagaaaagggcaggccaacctggcgctcgaacaggtgcttgacgcgattttcctctatgcagggttgacctcaattatgagcaatggagcgcataccggcgcagcccacgccctttacgacggttttaccgcctgcgagaaaacccgccacatcgctcacggcctgttggtcggctttggtaatctgtgcctgctggcgctggagaatcgcagcgacgaagagcttctggtcgccctcgagctcgcccgcgccagtgctattccagtacatttaaatgaaatatctcccgacctgtctgatgccgacctcagtctgattatcgatcaaagcctgcgagcgcccgacatggcgaacatgccgactgagataacgcaccggcagatgcgcgaggcgatagtgcgagttcaaacgttaagtttggtgaaaacttaaaaaatgaggtttttggctgcgcgccggctcttgctaacgaccgcttactgggctgctgccctagacctgctttttaaggtcaacgtcaattaactccgaggagtttttccggtttgaaagcttcaaggggtatttacctttccgcgccgtcctgaacccgccaataaactcttaggtaaaaccgtgttcagcctttgggcgttgcctgccagaataagggcgatttctgacggtgggcattagagatgccgcacgttccccgccaatgtgaatctgacgcagaaaagacatcatatttacagcagttgaggcaacaaagaaaaacaaaaaaatcccgccttagaccgagcatggacttgacctcaaggttgccgatttttgtttagaagcgggttgcggattcgtgactgcgcccagcgtgcaaagcacgtgcccttgacctaaaagcccttgacccaaaagctctaaaagcgaatcaggaccgctatgccctccgccccctaacgccaataaactcaccacacaggtagcaaccacgtaataagccggaatatcgagattgccagtctccttgatgaggccggtgataatcagcccagcacagcccgaaaacaccgcatttgatagcgaatatgacagcccaaggccggtgtaacgtgtgtgcgtggggaacatctctgccagcatcgccgggccggggcccgcgacaaccccgatggcggcaccggctatcagcaccgcaatacccttaagcagcagactgctttgcgcgtcttgcagcagatgcagcagcgggaaggtcagcagaataatgacccccatcgccgccatcatcactctttctcggccaattttatcactcagcatacctgctggcagaatggctagcgcgaagccgacgttagccagcaccgtggccaccagcgcctgtaaaaaggtcgcatgcagcgaggtttgcagatacgacggcatcaccaccaaaaaggtatatccaccggccgaccagcccatcatgcggccaatgcccagcgcgatagcctttatcgtttcgccaaacgaggcgttgagcggtacggcaccttcggcctgcgtctctttaaatgccggcgtttcatcgaggctcaaccgcagccatagggcaaccagccccataggcagcgccagcaggaagggaatgcgccatccccactgagttaactgttcgggggccagtaaatgggcgagcagagcaacaagacccacgccggtcaacaggcccagagacacggtgaacgattgccatgcgccataaagcccgcgcttgcccttcggcgcaaattcggtcatcagcgacaccgcgccgccaaattcgccgccggcaaataatccttgcagcatacgcatcagggtcaacaacagtggcgcggccacgccaatcgaggcataggtcggtaacagaccgatagcggccgtcgcaatcgtcatcaagaccaccacggcgattaacgtcggtttgcggccaatcctgtcaccgatgcggccgaaaacaatcgcgccaatcgggcgacagaagaacgccagcgcaaaggaggcgtaggtcaacatcagcccagtcagtccgctttgtccctccagggtgaagaagttaccggcaatcaccgtcgccagataaccgtaaacgccaaactcgtaccattcgataaaattaccgaccgaacctgccaccaatgcgcggcgagactgcccggcagtgagggatgttgcgggaatatcgtatgccatcatcgcccttgaaaagtgattgtctgattataagcgtcccagattttctaagggatggcgaaacaatgtcaatgaatttcattgtattaagggaggcagcacaaggttttgagaaaaacaaaggcgtgaagcggagaggttttttgccgccaatccctggcgggcaaagtttgcgtgtagcggtcagagcgtatggatatcgatgccatcgccgatgttgcttttctggtaataggcgcgtgggacttcaacctgatactgctggtcaccgtaggccacttccagaatgtatttttcgttttcataagactcgatgggaataaatccaaagaagccttccgccacgctgatggtgcgcgacgagggtacggcatagcgatgaaccaccttggcgcggagcggctgttgcttgccggtgatgtggttccataccaggttaaccggttgcgacagtgtgctcagcacgcctgaggccagcgagttcaggtcgctcaaactggttttcaacgcggcggttgaataccaggcggaacgatcgtcaggtttatgtgttgacatgatcaatacctcgttggtctgtatataacctaattactatatttttctggtcttaagatccaatcattttttcaactaagttaatccaaaacggaagcaaacgggcgataaattgcccgctaagcgtttattcggtagggatacggcggcgtttttcggccagcaacagcgggcaggaagggcacatggcgacgtctctcagctcatagcgcaggcagcactggcggcgatacagcgggctttgcggatccctgggattttcagggcgcagcggttgaaacagtggatttttccttcctgccgccagctcgcgggcatccattaaggcattgccgtcgcgagtgtcggccgcaattaattcggcttgctgaatgccccaattgacgcgaaccgccgcgttgccccagtaaatcccaggcttgagactggaggcgtcggcaagagcctgacacaccggacgcaaatgttgttcgatcatctcttcgaagcggtggaacggcgattcggcgcgcggggtaaaggcttcaccttctccctgcaggtaaatctgactcggcaacccctcctcctgcaaactcataaacagcttttcgggatggatgggcagttgccagttgtggctcagggaaataatgacccagcttggcagtaggttggcgaaataccactgagaccacattgagatgcgcgcacggcgtttgtcgatttgccccgcatcctcggcgtgaacggccagatagcgttcgagcagtctggtgcagccttgttcgctggtcagcaggctcagaggcagggcgtccgccacctcagggtcataaacttgaattgatcggcaacccagggtattgggccatcgcgaaagctatcgaagagtgtctgcataatcaaaaaaatgaatcagccaatactttagagataacgcagagtatctaaatctcaacagaaataataattatttctatttctgtttgtattggctgttacagggctcgcaaataagcgccataaatttgcctttttagagcagcttagcgtgctcaagaatggctttgacctgcgccttcttctcatcgcttagcggctgagccgggcgcagtgagttaaccggaatatccacgccaaccagctgaattgcatacttaatcacgttgtagaacggcgtatccagcgcatagagtggcggtaaccaggaaagttgctgctgaagtttgaccgccttgtggaaatctttatcgcgccacgcctgataaataccgcaggtgagctgcggggcaaagttggcgctggcagggattgagcccgcgccgcctaaaatcagcgtcccaaacaagtattcgtcatatcctgcaaacacggcaaagtctgggcgcaccggtaacacggcctgaagggtttcacggatgtggttaaggctgtctaccgtatctttcaatcccacaatattcgggtaattcagcgccagtttgcggacaacgtcgaccgggatcgactggcccgtgagtgccggaaagttataaataacgatcggcagatcgaggttttcggccaggtagctgtagtgcagggtgatgttttcttccgccagcggattgtagtagggattgaccacaacaacgccgtcagcgccgacgcttttggcatgacgggcgaagctcagcgtcgcctcggtacccggatgcgcggcgccaatcagcaccggcacgcgcttattgacgtaggcggtgcaaaagcgtgcaacctcgtggcgcaggtcgtcggacatatgggcaaactccccggcgctgccgaggaaaaacagcccatttacgccaccggcaatagtgaaatcgatgagacgtttcatgccttctttatcgagctgttcgttcgcgtcaaggatagtcgggaccggcgggatcacgccgtgaaacagggacgttgtcattttgctttctccatgcgcataaaaaaagaaacaccctcctttatagaacgatgtttcatttttatatagcgcagggggaaaattacagcgcattcattggagaagttgaagcagagtcacatcttgtcgctacatcaccagcgcctgaccgtctttgcgtgattcgcttccggcgaggtagtgaccctgtggatggcggactatcacctgcgcgccgccgaagttgtgaccctgtaacggatcctcgaccagcagttcatgccccatggcacgcagcgccgcgagcgtattggtgtcgagcgtggactcgatagcgacctgccgcccttcaatcacccgccagcgcggtgcatcgatcgccgcctgaggattctggccgtaaagcatcacccgaatcgccagctgaagatgccctgagcctgcattgggccgcccatcaggccaaacgacatcagcggtttgccgtcgccgtcggtggcaaacgccggaataatggtattcaaagggcgcttgttcggtgccacacagttggcgtgcgcggggtcgagcacgaaaccgcagccgcgattctgcatgctgatcccggtgcctggcaccacgacgcccgagccaaagcccatatagtttgactgaatgaacgataccatcatgccgcttgcgtcggcggtggtcagatacaccgtgccacccggcttcggtgagccataggtcacgtcactggcgcgttttgggtcaatcaggctggcgcgctgctgtaaatagtcgtcgctgagcagatgctcgggactgaaatgcatatggtcgacgtcggcgatgtgctggtcgagatcggcgagtgccagcttcatagcctcgatcgacaggtgcagcgtctgcactgaatccaccggctgcgagccaaagtccagcttttcgagaataccgagcgcaatcagggtggcgataccctgtccgtttggcggcagctcatgcaccgtgccaccggcaaacggctgtttcagggtctcgacccagtcaaccttgtggtttgccagatccccaagggtcatcgcaccgccgcaagactggctgtgagcgatcatcttctcggccagctcgccgcgatagaacgcttcaccttcacttttggcgataagctccagcgtgtcggccagcgccgggttacggaaaatttcgccgacttcaggtgcgacgccgttcggcgcaaagcattcactgaagccgggctgatcgtgcagcttattcaccgccgccttccacagtcgactaatcagcggcgaaacgggaaaaccctggcgtgcataatcgatagcaggctgtgccagagtggtcagcggcaggctgccaaacttttttgctagctcaacccatgccgataccgcgcccggcacgctgaccgagtcccagccgtaggtcggcaccgcgtctttaccggcaaaatattctgccgtccaggcggcaggcgaacggcccgaggcgttgagtgcgtgcgtttccttgccgtcccacacaatggcaaacgcgtcgctgcccacaccgcagccgctcggctctaccacggtcagcgccattgcagttgcgaccgccgcatcgacggcgttaccgcccagcatcaacatacgcatcccggcctgtgccgccagcggctgtgaggcggaaaccgcattggcgccgatcatgcttgggcgccgggtcggataggcaacgttaaaatcgtaagactgagacataatgactccagtaaaaagtaaacccctgaaacgcatcagaataactcgcagacaaaaaaactatcacactcgctgcctgaatgaccgcgcttttattacaccaaaatgtgctaagcacctacctgcgggccttttgccccatctgaatagcaaatgcctgtcaccttgcaccgtgttggggattgttcctacggcgctcgcggtggttatttaatgtacaaaactgtcgagccgcatacaggctgttaattaatcggttagttaaatttggcatgatggttgcagaatggaattgggttttttagagatggcaaactttctaccgggggtttacaagcatgaaaatgaaatctatcgctgtgtctgccttgtcgtatctttgcgttacccttgccagtgtttcggcgacagcacccgcctttgcggcagaagcgcctctggctatgaacgccgagctgcatgcccagcttcctgaaaaaattcgtcagagcaaagtcatcaatctggtgaccgacgcgcactatccccctgcgagtctttcgctgaagataataaaactatggtcggattcgaaccggacctgtgggacgcgatggggcaggtactcggcgtgaaggtcaagccggtatcgatagattttgccggtctcatcccgggcgtgaaaagcggccgctatgacgtcgccgtcgaatgcatctccgacagcctggagcgcgaaaagcaggtgaccttcgttaactatgcttacgccaccaacgaggtctatacccttgccaccaacacccgcgtcaaggcagacccgctgaccctgtgcggattaaacgccggggtgcagacgggcaccgactttgagcacgccatcaacgagatttataccccgaactgcgttaagcagggcaaaccggcggtcaagaccgttacgctgccgtcggcggacgcagtactgctggcgctctacgccggacgcgtcgattttgtgcttaacgatgccgccgcagcgggggaaatcaagaaaaaagccccgcggccaattcggacagtgcagatgcctctgatgcctaaatactatctcggcatggtggtcgcgcatgaaaacgacgcgctgtcgcaggcgttgcttaaagcgctcaacgtgctgcatgaaaacggcacctacgacaagataatggccaggtgggaactctcggacgtacgtcttgccaagccgggcatcaacctgatgaaaaccaacccaatctgaagcgaggactgaactatgcgtcagtcagggcataacgccgctatcgcaaacgtcgagacctgtgacgtggtgattgtcggctcaggcggtgctgcgctaagtgcggcgctgcgggcagcgcaagggggactgtcggtgattatcctcgagaagagccctctgctgggcggcaccacggcgatgtccggcggtgcgacctgggtgccagccaatcatcatgcgcgtgcggcaggtctggcggactcgccggaggaggcgttgcagtatcttcgcgcgacggcgcccgaaggctgggccgcaacggaagacgccctgtggcgtgcatttgccacctctgcctctgagatgctggcctttgtggagcagtattcgccgctgcgttttgccctgaccgacgaggcggatccgctggcgggtttcgccggtgccaagccccgaggccgcatgctcgcccctttaccgttggccgccagcctattggaccatcgcggatggaggctgcggccctcgccattgccgcagctttatacctatcacgaggtgattaaagaggacatttggcaccatccgctagaagttgcctgtcgactctcgcccagactgctgtggcgctgggggcggcggctgcgcaccaaaggtggcgcaatgattaccggcctgctggcggggtgtgcggcgcttggctgtggaatccaaacgcaggcgcgggtagtcagcctgctcaccgagggcagccatcgggtgataggcgtgcgctatcgtcatcggggacggctgattgagctcagggcagcacagggcgtagtgatcgccagcggggatttgaaggcgacgtgaagcgccgagcaacgcattttcccggtcctgtggattacgtctgtagcccggacaccaacaccggcgacgggcagcgtatggcggaagagataggcgccgagctggcgcatatggatcaggccaacatcggcggtgcgctgccgtggcgttatcaggggcaaccttgcgggctgtcggtttattttcactacgaaccgaatgccatcctggtcaatgcacagggtcaacgcttcaccaacgaatttatcttcaatcttggcgagcgcctggacgcgcgtgacgctcagggcaatcctctgcatttgcctgcgtggctggtggccgacgcagagctgctgcgccgttcaccgatgctgaagctgatagcgctgcgccatcctcagtggatggttagagccgacacgctggcgcagttggcctcggcgctcaatctgcctgaggggagcctggaggctaccgtcgcccgattcaaccagttttgcgaacggggcagagacgacgatttccaccgcgagcggtccactgcccacggcgaggcggatgcccgtttccatggtggcctgatgaaaatcgtcaggccgccgtttctggcgatgccgttcaatcgttcctttcttgccaccaagggaggaccgcgcaccgatgaatttggccgcgtgcgccatcgcgaaggcggcatcattcaggggcttttctgcgcgggcgtcgcgatggctaatcccatcggaacaagggcggtaggggctggtacgacgctcggcccgaacctgacctgggatatatttgcgggcgtacgctggtacaacaggcggcgggcgagtttcaccaccgtatggaagaagcgtcatgagtgacctcaacgacaaaattgcgctggtaaccggcggagccaaaggcattggccgcgccatctgtctcgagctggcggcaaggggtgccaaaattgcattggtttatcgccgcgacggtctgagtgccgaaaaaacggcgcaagaaatccgactggcgggcggacaggtcggcctttaccaggcggagttgaccgaacgacagagtgtaaaccgggcagtggcccaggtcgtcgccgactggggcgcgatagatattctggtcaataacgccggagccagtgcaccggccagcctgctcgagttaaacgacagccagtggcaacaggttttgcagtccaacgccaccggctgttttatcactagcaccgaggtggcaaaagtcatgcttgcacgcggcggcagcattatcagcatcgccggggcatcggcgcatcgttgttatcccggcgcaggcgcttttggaccgagcaaggcggcagtggttaatctcacgactcagatggcgatggagtgggcacagtacggtattcgggtcaacggcgtcagccctggcccgattcgtgaggccgacgacggctggcagcagcaggaacctgcgttggcggaagaggtaacccggctgccgctgcgccgcgccggcacgccgcgtgaggtagcgaaggcggtgtgctatctcgccagtgaagacgccggttataccaccggccagatgctgattgtcgacggcggtggcgtctgcacctggtatctggcccctgaaatcaggagaacatcatggcattagacagcattgcggtcgtagaagcgcgtcaggtggtgaagctgtttaacggcgtcgagatccttaaaggcgtggatttacgtatcgagagcggcgaagtcgtgtgcctcatcggcccgtcaggctctggaaaatcgaccttcctgcgctgcattaatcatcttgaaaaaatcgacggggggtcattgcaagtgtttggcgagtggatcggctatcggcaggtgggcgacaagctgcacattctcaaggagtcggagattgtgcgtaaacgcgcgcgcatcggcatggtgtttcagcgcttcaatttgttcgctcatatgacggcgctggaaaacgtgattgaggcaccgatgcaggtcaagaaaatcccgcgcaggcaggccatcgaagaggcaaaggcgctgctcgaccgcgttgggttaagccaccgctacgatgcctatccgtcggagctttcgggcggtcagcagcagcgggtggcgattgcgcgcgcgctggcaatgaagccagagatcatgctgttcgacgagccgaccagcgcgcttgacccggagttggtcggtgaggtgctcgacgtgatgcgcaatctggcgcaagacggcatgaccatggtggtggtaacgcacgaaatggccttcgcccgcgaggtgtgcacgaaggtcgcctttatggacaacggcgcgattattgaaaccggcacgccgcagagcctgtttaccgcaccggcccatgcccgcacacgagactttttaaaccgcgtgctgtgagtttgccagcaacgcaaccggagtccttccttcagtttgagagaatgagagaaatgatgacagataatcagcctcatccgcgactcggtctggcgcagaaagacgtcccgccgcgcactcagccttcgggcgcgccgcagccggtgccgccgccgctcagcgtggtcgcaccgcgctattacggacgctgggtgtcgctgctggtggctattgtgctggtggcaatggtggcccattcgatgataaccaatcccaattttgcctggggaacggttggcaaatatctcttctcaccgaccattctcgaagggctgtgggtcaccgtttggctaacggggtgattatggcgctggcgattgtattaagcattgcgctggcggtgatgcggctgtcgcataatccgctgttggccggatttagccgcggttatatctggttctttcgcggtacgccggtgctggtgcagttaatcttttggtacaacctggcggcgttatatccaaccttcagtgtcagcctgccttttatgccaacgctctattccggcagcatgaacgacttaattacgccctggacggcggcgatattagggctgggattaaatgaagcggcgtatatggccgagattatccgcgccggtatttcttcggtagacgaaggccagcaggaggcggctcgcgccctggggatgcagaaagtacagtggctgaagcgcattattctgccacaggcggtgccgttcattattccgccgaccggtaatcaggttatcggcatgctgaaaagcacctcgctggtcagcgtaatttcactctcggacctgctttattcggcgcaggccatttattcccggacctatgaaaatattccgctgctgatcgtcgcctgcatttggtatctggtcgcgacaaccgggttaagcgctattcagagcaagattgaacgttatttccagaaaggcaaacgtcgttaattcatgcagttttcgccgggggatcatgaaacttggattatttaatttaatgtcgtttaaagacaatcctggaggtattcagggcgtcattaaagatatgcgcaaaatggtggcgctggccgaggagattggctttgagacggcctggtttgccgaacaccattttaccaactattcgctgagcgtttcaccgctgatgatggcggcgcacatggccggatacacgcggcgcatcaagctcggcacggcggttatcgtgctgccgctgtatcacccgatgcgcctggcgcaggaaatcgcgctggtggacaggctgaccgacgggcgtctggtgctgggcattggcagtggctatcaggcctatgagttcgaccgctatgggctcgacgttgaggagcgcaatcaggcgttgctcgacggctgggcgattatctccggcgcgttgactgagggcaagacccagtcgccgggctacaacggcgaacccctgcaaactgactttctgctcaatacgctgcaacagccgttaccgccgctgtttgtgacctcgaccaatccgcacattctgcgcgcttttgagccgtggagtccgacgccttttgtgaccgccggttatcgcgggtcgccgcgtttgcgccaaatggtcagcgatgcgcgccacggctgggcacaggctggaatagacgtaaatcgaccgattgcggtgcagcaatatatccacgttaccgacagtcaggttcaggcacatcaggccgccgagcgcgcgatgttcgtcgcccgcatgattgccgcgctgcatgagaaaaaaaccgccaccgagggtgcatttatcagcgcgccgcctttcgccaacgagccggacgccgatgaaatctgccacaacctgatgattggcgacccacaaagcgtggcgcaaagaatcattctcgaggcaaaggagaccggtgcgacgcactacaactgtttttttcagtttggcgatatgcccatagagcacgcgctgcgctccttgacgcgctttggcaatgaggtcatcccgctgctggaaagagagctgggcagagtccgtagctgagagtcaggtaaagaatcggtaatagattcatcgtcacgatgcaatgtcttatataaattgaatttatggaggcaacaccatgctcgatctgtctcaaagaattgactgtgtatttgatgatggccaagccatcgccaggcaaattaccgctgcgcaaagcaccgacgccgggctggcaggcaccttgccgccgcaggcctacaacagcgacgcgttctttcagctggaaaaccagaaaatctttcgtgaggactggttgttcattggccacgtctcgcaggttgccaacgtaggagattatttcagccttgatattatcgacgagccggtgttgtgcacgcgcagcgacgacggcattcgggtgatgtcgcgcgtttgcctgcatcgctgggtgccgattattgaaggcagcggcaatgcaaaagcgttcgtttgcccgttccacaactggagctataacaccaaaggacagctgatgggtgcgccgctgatgaatcaggccgccgactttgaccgtaaatcctgcgagctgccgcaaattcgcagcgaaatcgtcgccgggatgatttttatcaccttctcctccgacatcgattcgctgctagcccgccttaagcccgtcctgtcgctgtttgaaaaatatcattttgccgagctgcaaactgcctatgagctggactacgactgcccgtttaactggaagatggcggtcgagactttcatggagtgttatcaccattcggcagtgcaccgcaccacgcttgaagacagtttccccggccgactgagctatatcggtgaggacggcccaggctggaccttctgccatcagccgctgcgtaaaaacggcgagattagtgaagtcttaaccgccggtctgctgccgttcgacggcatgagcgaagaggatctccggcgcatcgatctgatgctgatttatccgttctgcctgattggcattaaccctgaccgtatcagcatcagcacgctgttgcctgtcaataaagacctaacgatctggcatcggttggtgctggtctcgaaggcctctatggctcaggaaggttttgctgtcacggcggaaacgatgaaaaccggcagcaaggcgattatcgccgaagatttgcaaatcaacagcctgcaacggcgcggtagccggtcacagttggccaggcccggcaggctgggacatttggaaagaaccgtttggcatctcgccaactatatgaaacgcaaacttttatgatccatcaacttcaataaccgatgattcgaatcaactaagggacgcagtatgagaacgttgaaattaggccgctcgggcctggaagtgtcggccgtctgtctgggatgtttgacctatgcaccgaaagaggccagcggctacacctggacgctcagtgaacccgagagccgaccgtttatccgcaaggcgctggagctggggattaacttttttgacaccgccaactcttattccaagggtgccagcgaggagattcttgggcgggcaatccgtgatttcgccgaccgcgataacgtggttatcgccaccaagctatacaacccgattcgcagcggtccgaacagcaaggggctctcgcgcaagacgattatgaccgagtgcgacgcgagcctgcgccgcctcggcaccgactacatcgacctctaccagattcatcgttgggactacgacacgccgctcgaagagacgctcgaggcgctgcatgacctggtcaaggccggcaaggtgcgttatctgggcgcgtcttcgatgtttgcctggcagttctccaaggcgttgcaggtagcaaagtacaacggctggacgcggtttatcagcatgcagaaccacctcaatctgctttatcgcgaggaagagcgcgagatgatgggcctgtgtgaaagcgagggcgtcggcgttacgccgtggagtccgctggcgcgtggtttgctggctcggccatggcagcaaccgaccgacagcccacgcgccggtcgcgacagctatgcagaaactttgtattccgcgacggttgaggccgacaggcgcgtcatcgatgcggttgccagggtcgctgacgcacgcggcgtgccaatggcacaggtggcgctggcgtggcagtaccgccataaatcggtgatcgcgccggtcatcggtgccacccaattttcgcatctggaagatgccgttgccgccagcgagctggtactgagccgcgaggagattcacgcgctggaggcaccctatattccacacaacgtcgctgagcacgattagcggtcactattgagattgtttaacaggcggaaaccttaatgaagaagacggcagaacaaatcgcagaagtcgagcagtcgctgagggagaaaggcgttgagtactgtatcggggcctatgtcgatattcacggcattccgaagggaaaagtggtgcctatcaatcactttaagcagatggcgagcggctccgaacggtacaccggctatgcactggacggactggggcagtcgccgcacgaggacgaactgacctcggtgccggatcttgaccacatcattcaactgccgtgggagccgaaaattgcctggatgccggcggataacgcctttcagggcgaaccctatgccctgaacacccgcgttgcgctgcaaaatgttatcaggcaggccaacgagatggggttcggttttaatctcggcatcgagtgcgagatttatctgcttaagcgcgagcaggacggctcgctttccgtgccggaaaaggacaacaagctaaacaaaccctgttacgacattcagggatttgttgaccagtttgcctggctggacaaggtttccacctgcattaactctctggggtgggatctctattcgctggaccatgaagacggcaattctcagtacgaattcgacttcaactatgccgatgcgctgaccacttgtgaccgcatggtgttcttccgctttatggcaaagcattacgccaaagagctggggctggtggcgaccatgatgccgaagccgttctctgataaaaccggaaccggcgcgcatttcaatatgtcgctctatgacctgaaaaccggcagtaacctgtttaaaacccatgacgccagcgacgaagacccttatggtctggggctgacagagcttggctattactttatcggcgggttgttgcgccacggccgcgcgctgtgcgccgccttcgctccgacggtcaacagctataaacgtctcgtgcgtcaggggcgatgagctatttctcctgggcgccggtgttcaactcctacggctcgaataatcgcaccaactcggttcgtgtgcctgcgggcggtggtcgctgtgaatcacgcaacgccgacggcgcggtgaatccgtatctggcggccacgctggcgctggccgccgggcttgagggtattcgtgagaaaattgacccgcgcagaccaaatgaagacaacctgtatgccatgaccgaggcggaacgcaatgcacggggtatcgacttcctgccgcaaaatctgctggaggcggtcgaggctttcgacagcgatccgttcgttgaggcgacgcttggcaaggcgttgaaggacgaatttgtgaagtataagacgcaggagtggaaccagtatcacctgagcataagtcagtgggagattgagaaatacagttcgatattttaaaggattacgcctccttccttgctaggggaggaggcgatgaggggttgcctcaggcctggacaggttctagatgttccagcacaaactcgcgcatgcagttgatggcgtgtttgtatttaaagtttgggaacatcaccgtgcggaacagcacgccgtcaagaaaggttgagataaacatcgacatatcggcaggattcacctcgcggaactccccggcggcaatgccttccttcagggtatttttcagcaccaccgactctttctcgtagaactttttaatcgctttgtcgatgttggtgagatgctcgtgggtgttggcatagtcgaggctgattttggccagtttttgcatcagcgtgaactgcaaaatgtgcacctcaatccatgagaaaagcacctgacgcgggctggcggcgttggcggtgatggtgtcgaactggacgaacgccttttctaccgcggcctcaataaccttcaggaacaggtcttccttggagccaaaatagtagtaaatgagcgccgagttcaggccggtcgccttggcgatgtccttgatgcgtaccgaagagtagttttgatgggcaaacaggtcaaaggccgagtccagcaattttgcggcgacgtcgctctgattctttttggccggcttgtccgctgcgggggcacgcgccgtgacgttgggttccttcattagccatcctgtcgttcagagtctattgtttaagcaatcagtttcgcatgacaaatcgggttaatgaaatgatttataggcattttatagagtgtttttaaaactctcagcatctcaataagttaactagttaattaattagcgggccaagagggaaaggcacaatgcaggactatcagcagttttcattgggggattttgtcctgcaaagcggcgaggtattacgtcaggcgaagcttgcctacgcgacttttggtgagctgaacgcgcagggcgataacgccatcctgatcccagctattataccggcacgcaccgcagctatctcaagctgataggagcgggcagggcgctggacccgaggcgttatttcatcgtgctgaccaatatgttcggcaacggcgtctcgagttcgccgagccacgacggcgcgcagcacggagcagatttccccacggtttccattaaagataacgttaacgcccagcatctgctgagcaggtcgctggggatcaacgcttttgcactggtgacggggtggtcgatgggcgctatgcaggcctggcaatgggcggtgagttttccgcagcaggtgaaggccctattgccggtgtgcggcacggcgcgctgctggccgttgaatcacgtcttccttgaaggcataaaaggcgcgttgcaggctgacccggtttatcaccacgggcgttatcgcacctcgccgctggccgggctggcggcgtttggacgcgtctacgccggatgggcctacagcgccgagtttttccgcgcggcccgctatcgtgatttagggtttgagacgctggaacagctgctacagagttgggaaaaagaccatcaaaactgggacgccaataatctgttggccatgctggccacctggcagagcggcgacgtcagcctcgacgctatcgctggtgtgaacgctaaaacctgtgtgatggtgggcagtacggatcgttattttactccagaggaggccagaatagagtttgaccgtttaccggcaaacgtcggcgagtggcggccgttggtctctccctacggtcactgtgcgggtgcgccagggcgctttgcgcgcgaaacggcggagatagagtgcgctatcagcgaactgctgcgagaaagttgtgcctgaactgagggcggcgtttgccgccctatcgggcgttactcgataaccgccagctcgacggtacggccctgatcgaaccaggtttctaatccggtgacccgcagttgcagcgagccttcaatcacttccccaatgtaggaaattggcagcggttcttcggcggtatcgtcgccgtagactacgcaaaactgctgacgtgggctgtagaagcacactgagccggtgcaaacgccgtacttctcacggcgcatcctgccgacctcttcggttttaaacttgttttcccacggcgcaacgatcggcatggtaaagaacaccatgtcgccaatcagtttaccgtgctgcaagatgctggtcatcggcagcttggcgcgcagctctttagccagattcggcactttatcttcccatacttcgatgacgcagacggcctcaccggcgacggacatttgtaatttcatggttccccctgattaaacagcaatagatgattaggcttttacgcggcggaagccgtcgccgagaccccagggaagaatgaaatcgacccacatatgcagacggtttgcccacgacagggcggcgtgagagaggtttgccagctcgccaagcgtttcacaacgctcggcggtggccacatacagatgaaccatttttgcagcttcgggcagactgacgaaatcgaaaaagtctgccttgtaaccgataatctctttaatcagcagttgcagagttttcaaatcggcctcgggattgtcttcggccacacgaatgagtccccacagcatctcgtcggccagcgtgcgcgcttcaccttcggcaaagatgatggtgctgaggtactggccgcgtgccccggtgccgcgcggaacgatacccttaccgaggtcggcaatttcagcgggctgttcaaaccagatcttttcgcgttcctgctcgaaacgcgcaatcacttcatcaaccgtcatgacctgttctcctgatgttaatggtgcaataaaaaacggagttaattaattaactaattaaatgcaactgttatgccaaacgggtgaacaatatttagtcgataaaaatcagtgtgatgaatttttgagcgaggatgaataagccagaaggtgagagagaggggcgagcgcagtgcaaaaatgcaccaaaaaggccagccggggaggctggcttaggtgagggtgagttctactctgccgcttcttcttcgtgccagacctcggccattagggtttcgagtcttttaaacagccgatagcgcggatgatgaaatgcaaactgttgctgattgggcataaagggctgtggcaagatgctgaccgcctgcaggacgcccgccgacaggctcggccagataccgacgccgacgcctgcgcagatagcggcacccagcgcaccggtctccttgcactcggtgacgcgaattgggatgcctaaaacgtcagcaaacatctgcggccagatgcagctgcgcgccgcaccgccggaaagcgtggctttttcgaacctgatgcccgcggcacggagcctgtctatgtgcgcccggtgggcaaaggtaacgccttcgaacagcgcataaagcatatctgcacgcgtgtgccagccgcccaggccgtagaatccggccttcgcagggccttcttttcgccccgaatagagatagggatgatagagcggcagctgattgttcggcgttacgctggcgacgatgtcactgctgcgcgccgcgccctgaccggctcgtccgtcgtcaaactcgcgtaaaaaccagtcaagattagccgctgaggtggcgctggcctcaattgccatatagcggtcaccttctatcatcgaattcataaataccgggcgcagatagtccggcttgtcgaccaccacctgattgatgctccaggttccggcgacaatagaggcctcccgacattgaccacgcctgacccgacggcgctggccaccacgtcaaaaatcccggctaccaccggaatacctgcgggtagaccggtcaacgccgcggcctgtggcgtgaccttgcccaccacttcgcaggactcatgcagcggtggcagcagcggcagcgcgtcttcaatatcgtaaagcgccatcagttcagggtcatagctgcggctggcgtaatagagcagacctgccccggcggcgtctgaatagtcgcccgaaacctcgccgctgagaaaatgggcaatcacgtccttggcaagcagcaggtggccgatgcggcgataaacgtcctggcggtggcgttttagccagctgataagcaccggcgtggccgcaggccagggtttttgcagcgaacgagtataaatggcgcggtcaagtcccgtgagttccagttcatgcacgcgggcaaaagcgcgatgatcgatagactgaatacccagcagcggtcgctgctgtgggtcgagcgcatacaggccgttgccgtgtccggcggcaccgacggcaatgacccgcatattttgctgtggtgcgcgcaacaggcaatcgcgaatggcctgcgtgacgccgaaatagatgtcctcaaccgggcgctctgcaaagcccggctgcggctgatgcgtttcaccggcacattctgcgacggacaagacggtgccactaagactaaacagcaccgccttgatcatggtgttacccgcgtcaatcccaagcagacattcactcataaataccccgcaatctagggtttacggcgcaccgcttaagcgccagttcaagcaatatacacatcagaaccgctgataaatctccagcgcatccgtgccgcttgcgccctgatggataatagccatcagcgccttcaccacctgtgacggattgctgtgctggtatacgttgcggccgtagaccatccccgaggcaccctgggccatcagtgcggcggtcttgtccaatactgccgacagttcacccttaccgccgcctcgtaccagcgtcgggcagcgtgcggcttccaccacgcgatgaaagtcttcaacgttatcggtcgggtcggccttgataatatcggcacccagctcgcgggccagtcggaccagcggcacaatcttgtcgacgtcgcccaaagatccgtaggctgcgccctgaccggcggggccatcaccaatggttcaatcatcagcggcatggcgtatttttcgcaggcgtggcgcagacggccaatattttcgacgcattggcggaaaatgcccggttcatcggggatcatgtagagattaaccacgactgcggcggcatccatttgtaaggcggcgaggataggttgttcgggattgtgcaacaccgcccacatttcacggtgacgtgcggcgttataggcgttgccgacgtcggtacgcagcaccagcgccggttttttctgcgccacctgttgcagtaagtcagcctgaccgtagttaacctgaatagcatcgggctgcgcggcgatgaggctgctcatcacggcgctgatatcttcaagcccaatcagaaaatccggttcgttggcgatgccgtgatcgatagcgacatcgagacattttccattgttaaacagtcgattaagcctgaccttatgggttgctgacatgactgactccctctgaagcgtgcagcggataaagcccggtcagcccgtgcaggctggcaaggcgtgaaagggtggtttcaagatgttcggcggtgcgcgcggtgctccagcccagctcgtcaccgagcagttcggcgagctccttaacccttgccagcgtgagttggccactgattgccagcggcgtgcgtcgcaccagcaggtcctccagcgcctcaacctgttcgcgttgaatgagatagcgtagttcgttgcggctgtagtccggcaactgcgataaattgccgtcaggctcaggctgttgatttataaaggtcgcaatgtttgccgccagagtgccataacgcgccaaaagctggctcacgcgttcgataggcacgcccgtccgttgactgacctgctgaatccatttggcttttctttcgggctgtgggtagtctttgccgccgccaatcgccatgtcgcccgtgctcaccttgcgccgctcgccaatcagcttcagcactttatcggcggcctgttggccaaatttccggaaggtcgtccacttgccgccgaccagacacagcgtggtgtagtcgcgtccggcttccggtggcagcagcaccagagagtggttacgcgaaatgcgaccgttcacttcgctgtcgctcgcgggcaggggacgcacgccactgaaggtgtaaagcacgtctttgtcatcgacggtaaaatgcggaaagacaaagcgcagcgactcgaggatatagcgctgttcctccgcctcgcacaccacattatccgggtcgtcgatgcgaatatcagtcgagccgaccagcacgttgccataccacggaaacataatgcacacccggccttcctgattttcgtagtacaccatctcgccgttaagctcggccaacagctgcggatggcggataatcagatgcgaacccttggtaccgccgatcagttttttgccgggatgattttgcatcaatgtgcgattgaggcgatcaatccaggcaccggcggcgttaaccaccacgtgaggatgcagcgtaaaatgctgaccgctgagcgtatccagcagggtgagattttccccgtcgctgccaatcagctgcacatagttcagcgccagagcctgaggattggcctgttcggcgtcgttaatcagttcaactcccagcctttccggtgcgctaatccacgcatcgtaataggtcgcactgcatttaacccagtgggcaaaatctggccaacgctgccgtgtggcgctctggccgttcagctcgtggcgcggcatagagccgtattgccgggtgtaaaggtcatacatcgacagaccggttttaatgatcagggctccgcgtcgtgatgggcgctcactcaggcgcagaaagcgttttccagcgttaatcaacccgccgctccagccgtcgatgggcaccgtagtccgcagagggtgaacgtagtgtggggcattcttgagcaaccggtcgcgctcctgcaccgattctttgaccaacgaaaactcgccggtttcaagatagcgcagtccgccgtggatcatcctcgacagcgcgccgctggcggcctgacaccagtctccctgttcgaccataatcaccgggatcccctgcaacgccagttcacggaaggtgctgatgccgttgataccgccaccgataatcaccaccggcgtcgcagttaattgctgcattttttcgattttaaccgagcgaggagaactgaacggcggtaacgcgttatcgtgttccatcagtaaatgctccgcatgagggggataaaaataatgtcgataaatgaagaggtttttaatgagaggtataggggaaaaacggggtgtgggcaaaaaatagcgtcttcacagtgacgggagtgtgatcggcgtcggtgaatcagacgaaaagagggcagaaagaggggaaaaccaggctgggattaagcctggataccgagaatggctttagtggtaatcatcgattgggccagcggtttgccgtcgcggtgcagtttattgagaagactgccgccgagccacagttgataaagcgcggacgccgtctgtcgggcatcgataactgtcagggagccgtcttgctggccctgttgtatacaggcgctgatcaggttaatcacctgcgtggtaccgtcgcgcagcgtaaggcgcattgcctcggaaaggtcggcgacctcggcgctaagcttaacgaccagacactccagcgcatcgcaggcctgagtgctacagtcgtaggagtagcggtcgtgccagttttgccagtagctcattagccgctcacggccggtcaggtcggcggcggagaatcgggtgtccatggcggcaagataggtgcggaagtagtcctccagcagagcctggccatattgttccttggacttgaagtagtgatagaacgagcccttgggcacgccggccgtttgcagcagttcgttgagccctacgctggtaaagcccttcactgccatcattcggtagccggtatcaagtatgtgctgtcgagtatcatcgtatgcttgtttcatggcagcgataatatcactcactagaccagtcgtctagttttcgtccgacgacaagcacgattttctataactgcccaaaaaagcgttttaaaaaaaccattgacttcataaatcgagaggtagagactgcattcagtttctagacgactggtctgttattggttttaagcttcgagcttgctctgcaaaatcaggcttgaaaaccaatggcagtccgcgtgtcaccgttcaaatcactcacgtaagggttcaacatgaaaattctgatggttctgacttctcacgacaaactgggcaacaccggacgtaaaacaggcttctggctggaggagttcgctgcgccttattacgcttttaaagatgccggtgccgaagtcacgcttgtctctccggcaggcggacaacctccgctggatccaaaaagtgatacccctgaagcacaaactgccgaaactgaccgcttccgtcaggacccgcaggcccagcaggaactggccagcacgggctgcttgccgacgtcaatgcggcagactttgatgcggtgttttatccgggcggtcatggcccgctgtgggacctggccgagagcgcagactcgattgccttaatagaagcttttgccaacgccgacaagccacacggcttcgtctgtcatgcaccgggcgtgttgcgccacgtgaaggccgccgacggctcagcgctggtcaagggtcgcaaggttaccggtttcaccaattctgaagaggccgccgtggggctaaccgacgtcgtgcctttcctggttgaagacgaatttatccgcctcggtgccgactactcgaagattggcgactggcaggattatgtggtggtcgacggccagcttgttaccggtcaaaacccggccagctcggcgtcagttgctaaagcactgattaaaaaactggctcactaagtctttatcctttctaaaaatcgcttaaatccgccgaccgctttggtcggcggatgagtaaaagagaattattgtgaataaagaatttaaaaatatcactatcgaccagcttcctggcgttgtcgcgaccatgaaacaggtgcacattgaagcgggcccggcgagcctcgagctgcgactcgaccgactacagcgcgccgagcgcctgcttaaggaaaatcatcaggcgctggccgaggctatctgcgccgattatggcaatcgtagccgctatcagtcgctggctgccgacgtcggtatgtctattaaatctttgcaacatgcgcaggaaaacgtggcgcagtggatgcagacgcaggaaaacagcgagccaatgctaggcatgcaggcgcgaatcgagtttcagccgctcggcgttgtcggcatcatcgtgccgtggaacttcccgctgaatctggcgttctctccgctggctggcgtgtttgccgccggtaaccgggcaattttcaagccttccgaactgacgccgaaaacctccgcgctgctggctcagctggtcagccagtattttgactcgctcgaactgaccaccgtgctaggtgaggccgatgtgggcgcggcgttcagtgcacagaagtttgaccacctgatcttcaccggcagtacggccgtgggtcgccacgtgatgcgcgctgcggcagaaaacctggtgccggtcacgctggagttgggcggaaaatcgccggtgctggtggcgcctgacgctaatttgcgtactgcggtcgagcgtacgctcacagtcaaaaccttcaacgccgggcaaatttgtatgtcacccgactatgttctgctgccggaaggggcgcaggatgagtttgtgcgccatgcgcgcgaatttatgcagcaggcgtttcccaccctgcaaggcaatgcggattacacctcgctggtgtgtgacgcgcactttgagcgacaaattgcgctgcttgaagacgcgaaaagcaagggcgcaaccgttgtgtcgctggcacccgaaggtgaagtcgcctatgacgcggccacccgtaaaatggccaccgtgctggtgctgaacgcgaccgatgatatgcgcgtgatgcaagaagaggtgtttggtccggttctgccgctgaaaagttatcagcaggagcaggaagcggtggcttacatcaatgcgcatcctcgtcccctggctgcctactactttggtgataatgccgaaaatcagcgtcgtatggccgatatgaccacctcgggtggcctggtcattaatgacatcatgacgcactcctcggtcgagagcctgccgtttggcggtgtgggtccgtcagggatggggcctatcacggcattcacggcttcctgcgttttagccacgccaaagctgtggttgagcaaagtccgagcggtgaatccagcctgagactgcgggcaccttatggtgaaaagctcgaacagttagaacaaattctgtctcattaatttattcgtataaaatagccgcaacgaacctgtgcaatgcaggttcgttttatgagaatattcgcagagaatattattttcgggtaactaagtgttatatttttcatttccgtctatccccgtaattattctgattaaaataacgccatgtaaattaatgagttatattaaaagtgcgtcagatcaaggaattgtgtgatttattatttttgataagcctatcagaaattactgatatttttgctcgtgatattcatgttatatttttcacacttaattccccgtgtcgttaatttaacgcaagagaacgtctggacttatcatgatcttattaaccggtgcggccggattcatcggctctaatgtgctgtcatcattaaataaaaccggtattacggatgtggttatttgcgatgcaatgggctgtgatgaaaagtggcgtaatattagcaattgcgaattcagtgacttcatcccgctgtcaaaactcgatgcctggttagagaagaaaccaaaaatcgaggctatcatccacctggggctaaatctgaaaccacggcggttgacgccgatgacgtgctcgagaacaacttctcccgctcggtccgcctgtggaaattctgcgcagagaacgaagtcacttttatctatgcttcctcctcctgtacctacggcgacggctccgaaggattcaaagaccatcagtcccgcgctttctgaataaactgaccccgcttaatctttatagctggagcaagaatatttttgatttacgcgtggctcgcgacgttgaaaataaaaatattcaaacgcctaagcactggtacgggcttaaactatttaacgtttacggtcccggagagtaccacaaaggcaacatgaagagctcggtaggcaatatatgtcagtcggtgttaaatgataaaccggtgatattatttaagtctgaaattcccgagtttaatgacggcgaacagtcgagagactttatctatatcgatgatgtgactcaggtcattaactggttattagtcacccagcctcagtcgggtatttataatgtcggcaccggtgaggccaattcgtttctcactattgcaaaaacggccttcgacctgtcgcaaagaaagcaaaacatccattttgccccgtttcccgaggtgttgaaagagaaggcgcaatactttactcaggctgacatcagcaaaattagagctgcaggctatacttcgagctttaccccgctgcgtgaagggatggcaaaatatatcgaatacttgaagcaggttggcggttaaacgatcttatcaagacttcccgccgcgccattttgcgatagagtgaaagccttatttcacctcttcagccaaaggattgtctatgtttccctgccatatgcgcattgcgcgcccggttaccgacttagcacgcagtttccagctctaccatgatggattaggtctgaacaaaattgccgaatttgctgaccatgacggcttcagcggcattatgctgggccatgactccctcgcctggcaccttgaatttaccgtctgccattctcatcctgtcaaacctcagccctctaccgaagatttgctggtgctgtacatccccgagacctccgagtggcaggcctcctgtgagcgtatgctgagtgcaggattcgttgccgttgaatctttcaatccttactgggacgtcgcaggtaaaaccttcatcgacacggacagttacagagtggtgctacagaacagggcgtggggataacataaaggttttacccaggcggcgatgcgcggttattatcgaaaacggggtttttcctaaaaccgagcatttaaggagagagcatgagcgttcaacgtgtccagcagttccttgctgagcatgcacctgaggcaacggtcacggtgctggaaaaaagtaccgctacggttgccgaggcagcagaggccttcgaggttgaaagcgggcagatagcaaaaacgctgtcgtttcgggtgaatgatgaggttgtactgttggtgatggcgggcacggcccggatcgacaataaaaagtacaagcagcttttcggcgtcaaggcgcgcatgttggcgtctgacgaagtcgaaactttgaccggttatccgccgggtggcgtttgtccgttcgccgccgctgatgcggtcaaagtgtattgcgaccacagtctaaaaagttatgacgaagtgctgcctgcgggcggcagcgttaattccggcgttcgcattgccccggccagactggcgagcattaccggtgcagactggattgacgtgacccgttaaagaaagcgttttctcactctgtttgcaaagagcggccaaaaggctgctttttttatttgagcctttcagacttgggtgacttcctgcctctaaaaatcgtgcatcctatttcaggatggcttagcattatcctatccccccgataggatagtaaaatgcacgcacatgaaacacatcctgaaatcataaagcgcctcaagcgcgcgtccggccatttgaacagcaccatcaaaatgcttgaagaccagagaagctgtctcgatattgcgcagcagctgcacgcggttgagaaggcggtcattaatgccaaaaaagtgttgatccacgaccatctcgaccactgtcttgaacacgcgattcaggacggcgaggtgtcagccgacgttattcgcgctttcaaagaaattaccaagtatctctaaggatcagcatgaccgatttttctgcactgttgcagtcgggtatgggtaatgcctggctctttattcccagcgccattttgctcggcgcgctgcacggcctcgaacccgggcattccaagaccatgatggccgcgtttatcgtggcgatacgcggtaccgttcgtcaggcggtttaccttgggctggcggcgacaatttcacatacggccatcgtctggctgattgccatggggggcatggcgctgagccacaagttttctgccgaatctaccgagccgtactttcagcttatttctgcgtttattatcgtcgccacggcggcctggatgttctggcgcacctggcgcggtgagcagcagtggaaggccgagcagcgttaccagcaggtccatcaggacagcgatgagtcaaagctcgtcgataccgggcatggaaagattcaactctcgattgttgaagagggcgggcagtcacgttggcggattaagcgtatctcgggccagcactggagcgctaagtctgtttctgttaccacccggcgtcagaaaggttttgcgcagattttcgattttgaagaaaagggggattttctgcagtcagtccgcgctattcccgaacctcatcagtttatggctcgcctgtcgttgggccacgcggggcattcgcatgattatgatgtcgaatttgcagaaagctcgcacccaagttctcacgctgaactggcagggttagacgtttcttctcaggagtatcaggacgcgcatgagaaggcgcacgccaatgacattaaacgacgcttcgcaaatcgtgacgtgaccacggggcaggttattcttttcgggctgaccggagggctaattccttgtccagcggccatcaccgtgctgttgctgtgtatccaggtcaaggcattcacgctcggtgccgcactggttttctgtttcagcattggactggccattacgctggtcacggttggggttattgcggcctacagcgtgcgcaaggccacccaacgctggagcggtctgaacactctggcgcggcgggcaccgtatttctcgagcttgctgatagcaatagtcggtttatatatggggatccacggctggattggcgtgatgcgctagctctgcaaaggctaaagaaggatcaggagaggctctgttcagactctcttttaaccctgcttctgctggtgggccttcttgcgtttaaggtaatcgtcatcggcgcgaagtcggtcccagtaggttttgaagatagcggcggaggcggctttttcttcatcaatatcgcgcggcaaaacagagcggtctttggcgtatttctttcctccgggataattggcataacgacgggcgcgggtgtaacccatttggataaatttacgcgccatatccatgccaacaaaatcatcctgttcgcgatagcgttcaaacagcgtcataatggcttcggctgaggccttggcaacgtcggggttttgaagcgccagtggggcaaaatctcggatttataaggctcaaccatcagcacgccctgttcaccgcgtccaacctgataaagctcggggtgctggcgaaagtcgatattgtcgaaatcctgctggtaattaaacttgcccattttatccgtccttgaaaagtgtttcgggcggcgaaattgcgccacgcccctttgaattatgtgtcagggtttctcattctgcacgcaggacatgccctgagcgaggcctgtggtaaactccgaaaaacttttaaagcgacaggtgacctgtgtcccaggaaatcaacacccggctgccgagcctgaatgcactccaggcgttggttctgtgtgcaaaaacgcacagcatcagtaaagccgcacaacttttacaccgaagccagggcgccatcagcaggcagataaaacagctggaagaaatgtacggtatctacctgttcgaacgtgagcccaccggacttaccctgactaaggaagggcgcttcttccttgaaaatgcgcaggcaatactggacaaagtcagtcagttagagaccgacttatcggcgatgaacaaggttgtgcttatcaaggccccttcaacttttgccatgcagtggctgtttccgaaactcgataaaattcagcgcgcattgcctgattatattatcaaggtcgatacctctgcggatgacaagcagcggcaggccggcgagttgggcgacgtgagcagcattatcatcacccgagacagtatcggattgccgttctataccagctataagctgttttcagaaacgttgacgctgatgtgttcacccgcgctttatcagcaaatactgctcgaccgagaggtggtgaacaccgcctgcaagttacgtatcttgccgaacatgaaactgtggaacctttggcttgccgaaaacggttttgaaatggccaataccgagaaaaccattactttcgacacctcagagattgccatgtcggcggccgcagactcgctgggcgttgccttgcttgaccccagaatggccgcctcgaggatcgcacataaatctttggtcatcccatttgcgcatcaggtcgccagcggcaaaagctattttatgaacattaaagagaaggatcaggcgagtcccgccgtggtggcaattaaagagatgatccttggattcacatgatctcttctatttcatgatgttactgatagtttcactttgcgccccctctgagttttttagatggggtatgtctttttttactttgtatcgtctggcacaaacccctagagtacgtcggattcatttggcaccgctgaagagacattctcaatgaccgcaattgcccctacattgacccgccaggattataaagtcatttcactttcgctccttggcggagcgttagaagttttcgatttcatcatttttgtgtttctttccactaccatcgcaaacgtctttttccctgccgataccccagaatggatacgtttactggaaagcatgactatcttctccgtcggctatctggcgcgtccgctcggcggcctgctgattgcccatttctctgaccgctatggccgtaagcacatgtttaatttcacggtgctttttatggcgatgccttgtctggcgatggggttgttgccggtctatgcgcagattggctattgggcaccgctgctcctgctggtggcgaggataattcaggggccgcgctaggggcgaggtgcccaatgcctgggtctttgttgccgaacatacgccgactgaacatcggggattcgcgctgggtctgcttcaggctggcctgacgtttggctatatgctggccgcgctgaccgtcacctttatctcaagctacttcacggccgatgagcttaacgcctgggcgtggcgcattcctttcattgtcggggactgctcggtttcatctcgctgtggctgcgccgctggttgcaagaaacgccggtgtttatcgcgctgcaaaaggaaaagtctctttccgaacgtcttccattgatggacattttgcgcaaacaccgcagggcggccatccctgcttccctgctgaccgccgtgttgacctcggcggttattattgccgtcgtcgcgttacccattatcctgcagaaaagctggcaatttgatgctgcaaccaccttcaaggtgagctgtttaggcattctgatgctcaatattggctgtattatcgcgggtcgtctggttgacagatttggcgcctggaacatttttgccgtctattccgtcatgctggccattggcgtcacggtgatgaccctgtttctcggcagcaatgtgaagaccgttctcggctgttaccttttcctggggctgtgttgcggtgtgattgccgccgtgccggcggtgatggtgcagcttttcccgccgcaggtgaaggtgacggggatttctttaatctacaatctggcctattcgctctgttcgagcacgctgccactgatcgttttggcgctttatcgatatgcccattggacgctggcgggcatggcatggctggttgccgccgttggcgtaatgacgtttgtgttctaccgtaaaatttccgtttaccgttaacggaaactgtcaccctgcgcgctatgccactctgagaggtttacattattctgagcagtgtggcgctaccctatggcccgaaaccagccattacagcagtttcactccctgtggaatatgccggggtacgcggctcatcataaaggtgcagagctgctcaatattatttttccgctgactgttggccgaccagacgaggtaataaccgtccccgtgctcaccgcctgttcgaagggtaacgccaaaaggccgctgttgatggcctccagactcagcagcagatcgccaaccgagacgccgtggccgctgatcgctgccagatttccctgttcaagggtatcaaagaccttacctcgcgcaatattcagcgaatgctggtttccactgcccttgagccagcgtcgccagtctctgcggtcggtcgacggatgaataagctcacagtctggcagattttcacgcgccttttggtaaagcttcggtgcacagaccgggattaaccattctttgaacaacaacgtgctttccgtattaggaccaaattttccattgcccaacagaatggcgcaatcataaggttctttactgaaatcaatggtatcgatgtccatccacacgctggttatttcgatggtcggcgttgagttttcttccctgaagacgttcagcacatcgagcagccagcgcatggtcagcgtcgacggcgctttcaaacgaagctggtgactgttgctttgaaaagcacggcaggcattttccagactctgaaatccctcctgcaactgcccggcaagaaaacgcccggcgtcagaaatctcgacgcgcgggccgcaacgggtgaacagctgacactcaaaccaggcttctaatgtgcggatatgtcggcttacggcacccggcgtgacgttaagtgccgcagcagcctggctaaaagagccgtagcgtgcggcagtttcgaaggcccgcagtgcgtaaagcggcggaagagactgattcattcttggcgctcattgtgagttttactcacagttaactgtagttttatccgtttttcaagaccccgttctctgggaataatctcagtcagcgtagccaaaattaataaggaaagttgatggaaaacggtttattggctaatggagaaatggtcaaacaggctgatttaagaatgataggccatgatattggaaaattcaccggcgaaattgactggcgagtcgaggccttcttcgatatcagcctgtgtatgaacgatcctttatttccttgtctttttgcccgtaacgcatggaaaagtgaagcgcttaactttgcctttgtcagcacgagctccacgcaggtggacgtgattagtgcgttaaaggcctttgtacatcgtacaaaaacagtcaaagaggaagacaggctttatagcccctgctgatggtcttcgagcagaccggtttccagaatttgcgtcaggagcatgagtttgcctggcagcgcattcaggaaatgcacgacggcgacccgcagagttggccggatgccattccgaccgatccgcaaagcaacgaatggtcattttgctttgggggcatagagctttttatcaacatcagctgtccgagtcatctccagctgcgaagccggaatctcggacagcatgttgtttttgttattaatccccgagcccattttgacattgtggccagccataaagatgtaaaaggtgtgaaagtgagagagaagatccgcaggcgcgtctgcaattacaacaatggctatctgccgaaggcgctgggcttttacggcgatgagcacaatctggaatggaagcagtatcagatgaatgagccgggcagtgcggatttctcgcggtgtccgctgcatattcataataaagggggtaaagcatgaatctcacactgctgagcgcctatattctctcagtgctgatgctgctgcttacacccggccccgtggtggcgttggtcacaggcacggcggcgcgccatggttatcgtaaggcgttcgccacggtcgtagggaccaatggggcttctctggtactgattgcctttgctgcgctgatgcttgctggcgtggtctctctgaaatcaatctatctgtatgtgctcggcaccgtcggctcaatcttcatcggttacatggccgtgcaggggttgataggcctgagcaagacggagacggcaatagacgaagagttgcctgcccccgtgatacaaagcagcggcggattttttcgcggcttcatgaccgggatctctaaccctaaagatatcctgttcttcgtttctttctttccacagttcattaccgtaacacgtgattttggtagcagtatcatgaccttatccttggtgtggatcttcttcgacttttccgttctgaccctttatatcctggcggtaagaaggtgggtccctgctaaacacagtaagaagtttgagcttgcctcttcaattttcctgctgggcgttgcgttttgcggcgtcatttattacgtaggtgagataatctccagccttaacgcacctgtatagcttcctccccgatttgaggaaaagcgcgcctacggtatgtagagcgcgtttttttttacccttacttaccgttgcgcctcaaatgtgcgttattgatcgacatgacgaggttgctttttcgttaatgacttcttattcttatgttcgaaggttttaattcttcattcgaaggttgataaccctatgtggagcagaatatggaacagtcatttaccagccagaccctaccagaagaccataaaaagaatattgtacaaatgaagaaagagcttcgtcgccagattggcgatgttgaagcgcttttcgccgaggtttgtaataagattgagcaagagttagaggaaatcagtgccgtcaaggcccagggacaaaccgcgtggccggtggtggattacgccgagattgaggcagggacagtttcacagaacacccttgcccagattaagaaacgcggatgcctggtagtcaggcaaaacttccccgtgagcaggcgctggcgtgggataaatcgatgattgattatctcgattccaacaacttcgacgagcagtatcgcggtccgggtgacaatttctttggcagtctggaggcttcaaagcctgaaattttcccaatctattggtctccggcgcagatgaacgcccgacaagatccgcgcatggcgaacgtgcagtcattcatgaaccgcctctggaagtttgagtccggcggcctaagctggtttgatcctgatatcaacattatctatcccgaccgtatccgccatcgtcgtccggggacgacctccaaaggcctcggcgcccacaccgattctggcgcactggagcgctggctgctgcctgcttatcagaaagtgtttcgtaaaatcttcaccggacgtttcagtgaatacgatccgtgggatgcggcataccgtaccgaagtcaatgaatatgaggtaggcaacaccaccaaatgttcagctttccggacgtttcaggggtggacggcgctgtcggatatggcgctgaaccaagggttactgcacgttgtgcctatcccggaagcgatggcgtacgtcctgctgcgcccgctgctggatgacgtgccggaagacgagctttgcggcgtcgcacccggcagagtattgcctatttctgaaaaatggcatccgctgttagtcaaagcgctgagcagcattccggcgttagaggcggggattccgtgtggtggcactgcgacgtaattcactcggtagccccggtcgaagaccagaaaggctggggaatgtgatgtatattcccgccgcgccgctgtgcgagaaaaacgtcgaatacgccaaaaaagttgcccaggcctttgcgcgcggtggttctccggccgatttcccgaaagaggattacgaggccgagtggcaaaaccgctttaaacctcaagacctgaacgccatcggcaagagggcgctggcgttaaacggctaaatacgacgtaaagccccaaagcccgtgtgtgagcccaaatcattgatttgggccttttactttcattcgaaagtcttacggattaacgatgttaagcgcaatgcccatggcttcgagtttatgctgatactcggcaggcagttcagcatcggtaatgaccctgcttatgggatattgttcggaaaggggatagggctgaatagacccgaactttgaggagtcggtcagcacgatagtttctgtggatttagccagaatcgcattcaccacgtcgctgcgcatcatatcgcgcccggtaaaaccggtactgtcgtggaagccgtcgataccgataaacgccttgctgaaatgcacctgctgaatgccactgcgggttagcgggccgacaaccgactgactgcttttctgataaaagccgccaagaatgatgacgtcgcactcggtatctttcaaaagattggcaatgtaatagctcacggtaatgagagtgacattgccacgttcagctagcgtgcgcgccaacagggcattggtgctgccccctcgataaacaccgactctccgtcttccaccagcgaagcggcaaactctgcgataagcttcttggtgaggaagttggtttgcatgcgttgatcgagattatcgctctcggtcgacaccgccgatccgtggactcgcttgaggtagtgctgactctcgagcgcattgagatcctgacgtacggtaacctcagacacgctgcaaagctgcgccaactcgctgacgctgacgcttttacgctgattaacgatttcgagaatttgctgttggcgtgtgttcatagttctcattcgggttgctgagtaccaaaatactctatcacaacaacgagatggcctgttactcccgaaatgaattccgtcttattggcacgctacaggctttgtctccttatcggtctaccagggggacgacatcatgacgacaatcagtgactcagtatcgctatcacgtcagtcaagatggagccagctgctcctcgggcttatctgtatggcgttcatctacagcccgctgcttgtgctgctttccggcctggtgttcttcggctgcgccatttccttcgacttcatcaccgccgcgctggctctctggcggctgaagccgtggtgagcaaggtttatgcaggcgcgctacgtcaggtattctgctggtcgatacgctctgccagcaggccgtgaaacagcttcgtcgccatggagagcgtgcgttggcgaggcaaacacaggctgacgttcactacgcccatcaacgggtcggctaacggaatcgccatcagtttctcattctcgacggtatcaccgacgttgagttgcggcagaatgatcagcgccaatcccaggctggccagcttcttttgtacgtccagtgagctcacgataaatcgcatatcaaaggtgagtccttcccgtttcgccgccgattctaaaagctgcctaaccgagaagtttgagggggaatcgaaatcggatgcgccgccacgtcccttaacgtcagaaagccacgccccgcaaggggatgatgcaccgacatcaacaccttatgctgtagtttacagccgtgagtctgcatcgcctcagtgctgaccggcatataaaaggtcagtgccacgtcagcctttccggaaaccaatacctcggcaatgtgcggcgcgctgccaatttctatttcaaaggtgactttgggatgcagtttgcgaaagtcttcaatggcgggggcgatgaacgaggaaatgagactttcagcggcgcagactctgacggtgccggagacgatgctctgcgacgccgaaatcttttccttcaccgaatccagctcctgaagcgttgcctgcacggcctgcgccagatactgcccctcacgggttaattttattccccgcgggctgcgctcaatcaagggtgcgccataaaagtgttcgagtatttcaatttgccgcgtcacggcggtgggagtaacaaaaagcttgtctgccgcctctcgcagcgagctcgattttgccacctgactgaaatatcgtaatgcgcgcagctgcatattattcccttttttaaacggcagcgttgctctttaaagaggcaaagagatcactttccgtgcatttaaattaaaacgccgttaattgaacagcagcgtctttataaaaaacgattggcaatcatcgtcatactttgtgtttccggaataaatagttttgccgattattcgcggggcgcacattttgagtgcattgctgcgcaaagagaatgcgccagtaaaattcatgataaaaaatattttatttttatcgattaatatcaatgggtaatattaattgataatgtttatttaaagcaaagtccagcattgggtgcacacattttttatacgctgaacatgatatttagtgatagtggcgctaagcgcgttttgttattcaatagagagcttaaatagcgatgcccgtctcggtaatatcacctgacaatattgaggaacgccttaatgtcgaatgaaataaccctgggtcgtgtcagacccgccccaacgcgaaaggaagtggtcgctgtggtgctgggggcggccgtagaattttttgattttagcgcttatgcgacttttgccttgatgataggaaacgtcttctttccctccgatacgccgtttatgagtctgttattgtccgtttcggtatttgggataggttttattgtgcgtccgctgggggcaatatttatcggcagctatgccgatagggcaggccgtaaacccgccatgctgttgacgatggtattaatgacgctgggcaccggtggactggtttttcttccgggctatgcaacgataggcgtggcagccccggtgttgctggtgattattcgtatgattcagggctggcatggggaggcgaagccgggccagcgacgacgtttattatggaggctgcgccgaaaggcaaacgcgcgttctttaccagctggcaaattgtggcacagggtatcgccggtattaccgccgggctaatcggttattcccttaccgtttttctgacccacgaccagctggcaagctggggatggcgagtgccgttcgcctttggccttctggtgctgcctattgccctctatctgcgccgcaatttgcatgaaaatttcactcaagaggaccgggcggccagtaaaaacaccaaaacgctgctgaccgacgtcgccaaaaatcatggcagactggtgctgctcggcatctttatgctttcgggcagtaccattactcaatattttctcaattacatgaccacctatgcgcttaatgaactgcattttgcgccgagcaccgccatggtgtcgaccatcctgattggcgtctgtgtggtggtcttctcgttgactggtggttggatggccgaccgctttggccgcaaggtcacgattatcgcaccgaggctgctgctgttactgttactccttccgggtctggagattatcaatacctggcgcagtgatgcggtgttcttcagtgttattaccgttttggccgcgctacagtgcatcagcggttccggcgtgctggtggtactttgcgaaaactttccaaaagccatccgttccaccggtttctctattgcctacgccttcggcattacgctgtttggcggcacggcgcaaatcgtcttttcatggcttatcaaacttactaacaaccctgtttcaccgggctattacctgattgccgccaatatcctctgcctggtctctgtgatgttgatcaaggcaccttcacgcgccccgatagcgctgtcgatgaatgccgggaacggctgaccgctgctgttcaacgatgggatattaacttttaaatcaaaaggatcagtaactatgacccacgtaatgagctgggatgaatggaccgcctgcgatgcggttggcatgagcgaactgttgaaaaaaggcgaggtgctgcctgccgaactggcggcgcaggcggctgaggcaacggcacgggtcaatccacaaattagcgcagtcgttgaactgtttgatgatgcgattcgcgaacccaccaccgacggcacaaatatggccggtccgttcggcggtgtgccttttctggtcaaagatcttgggcctggcgtcaaaggacggcttcaggagcaggggtcgaaattcctgcaaggaaaccggccaggcgaagacagctttcttacccagcagttcagaaaagccgggctgaatatcattggccgcagcgcgacgcccgagtttggcgtatgcagttccgccgaaaatccagaggtctatatcacgcgcaacccgtggaataccgcgtataccccttcggatcgtcggccggagcttcggcctcggtggccgctggcattttgccgcttgcccacgccaccgacggcggcggttcgatacgtattcctgcgggcgccaatggccttatcgggctcaaaagttcgcgcggcgttttctcgattgcaccggcgctgtcggacatcaccggctatgtctcgacccagggctgtgtgagccgcacggtcagagatacggccttttttgtcgactgctgccgaggggccgcgccgggcgaattcatgccttactggaacagtgatgagccttacgccgaactgataaagcgcgaccccgcgcctttgcgcatcgccctctcacatcagtggggccttatcagtcggattcacacttcgtcagcgagctggaacgcaccggcagactgcttgaggagttagggcatcaggtagagtgggttacgcccgatatcgattttgaggccgcctttgccgcacaaaccgcctgctatatcagcaactttgcccagtttattgcgcgtctgcttgagaaaaaagggttaacccgccgccgcccgagtgggttgagccgataaatatcaaaatctggcaaaaggggattgatatgtcttacagcgaacgttggaaaatgcaggaggtgttcaataccacctcacggcgtttgggcaatttttatcagcagtgggatcttatcctcacgccgacgttctccaggccgacgccgctgattggcgaaacgcgttatttgacgctgagcgataatcccgacgtgctgagctggttttaccaactgtgggacattttctcctacaccccgctcgccagcctgaccggtacgccggggatatcgattccgctggcaacgcagcagtcagggctgccgctgggaatgcatctgcaaacccgacaggcaaatgacggcctgctgttgcaggtggccgcacagcttgagcgcgcattcggcggcagtttctataaaaatacccgcccgtcggtgcacgtcacgcgatgaaacctgagagccgccggggtgggccgttattcacgcagatgctgggtcggtagggcggtggtgtattttacctgactcagcgcaaagcttgagcggatactggcgacgccgtcaatctgcgtcaggcagtccatcatcagcgcctgatatttttgcagattctcgaccaccacgcgcagcataaaatcagactcgccggtcatcaggtaacactccatcacctccgggcgctcgcttaccgaatcggtaaagcgcttcagagagtctctgtcctgctgctttagggtgacgtgcacaaacacgttgaccgctaaacccagcgccaacggatcgaccagcatcgccgatccgcgaataatgcctttctcgcgcatgtcggccaccctgcgccagcatggcgacaccgacagcccaacgatttcagcaagctcggcgttactgatatcggcgttttgttgcaaaacgtcgaggatccgcaggctggtttcatccagcgagattttatctaaaggcatgacgcgtctcttgaggtataaaaaaccttgatttggttttatgaggaaatagttgttcttaatttagcatttgtatgaaaattgagaacagtttttcttcagccgctcccataaaataatttatcaattttctacgccaggagcgggtaatgagtgctgtaaacaatgagccagtcgacaattctgtcagtcaccgcacgcagcccgcgaccgtggtctggctggtggtcatggtggtcctctggggcttgagctggcccgcgaccaagcttgcactcgatgtcgtaccgccgctgtggctggcagcaataaggttcggatccgcctgtttttgcctgtttgtttttgttgccctgcgcggcagcctgcgtctgccttcacgcgccgacctgccggtggtggccagcgtcgggctgttgcagatgatggtgtttaccggcctcggcatgatagcgatgcagcacaccgacaccagtcacgcggtattattggcttataccacgccgctgtggggattctgacctcgtggctgttgatgcgcaaagcgccgtcgaggctacaaatcgtggcgctggtcaccgggctgattggcatcgcgctcatctgttcacccgccgagatggattggggccgcccggggcgattatgggctgtagcctgctgattattggtgcaatttcctggtcgctggtgattgttcacgtgcgccatcatcgctggagcagtacgccgctgtcgctggctccgtggcagatgctgctcgcgacccttcctctgacgttgctcgccgcgctgattgacggctcgccgtcgaccgttgtttttagcccgcacctgctgtggctgctgctgtttatcgggccggtggcgacctcggtctgcttcgtgattgccaccgagcacgggcgtcggatcagcgtcttcgccatgtccaattttaccctcggcgtccccttggtgggtgccgcggcctcggtagttattctcggcagccacctttcgacactgtttatgggcggcctgctgctggtgttcctcggtgtctcaatgaccgcgctgtcaggccggcgagcgcgtcactgacagtactgtttcaacagtgcgtgctgctccggctgtagctgatagcgataaaccgggcgtccggtcacgccatagtgaatactggtgaacaaaatattcatctgtgccagccaaatcagatacttacggcatgacactcgcgagatattgacctcgctggcgagttcatcggttgagaattcgctggcgggatgagcgtcaatccactggcataaggtgcgcagcgtttgctgcgttagccctttgggcaggcgtttctgctcttcttctgcgggggtgccgtgcagcagtctgtcgatgtccgcctgttgatagaagggctgattgtccatcagcgatttcttctgccgccagcctgacagcgcctcttcaaagcgcgagaactgaaacggcttaatcaggtaatcgaccacgccatagttcaacgaggtcttgatagtctgtgcatcggcggcggaggagatgacgatgacatccaccggatgtgccgcgctgcgcagttcgggcagcagactcagcccgttttcctggtggagatagatatccaacagaataaggtcaaccgggggacgaccattcgccagccgttcctttgcctgctgcaagttcgaggcgacgccacagcagctaaagcccgggatttggccgatataacagcggttgagctcggcgaccatcgcgtcatcatcaactaccaatacgttgatcattggatactgactcctcgtccccacggaagctggactaaaaattgcgtataaacgccgggttccgactcgacggtaacattgccgccgaggctgtctatttgctggcgaaccaggaatagcccaacgccgcgctcgctgcctttagaagacacgcctttctcaaaaattgtcgttagctgttctgccgggatccccggaccgtcgtcgctgacttcacacgccagccagccattctgatagtgcagcaagacgtggatttcgccctgtgactgttgccccagagcctcaagcgcgttctcaattaaatttcccagcacggttatcagcaccgcaatctgctcttcgctcccattattgggcaaatcgctggcgtcgctgagcatcagccggtggccactgctcgaggcgcgattgattttggtcagtaaaaatccggcaatcagcggcgacttaatcttttgcagtagcgagccaatttcggtctgataaccgttggcggttttcaggataaaggcttcgagctggctgtaatttttcatgtgcagcaggccaaggatgacgtgcagcttgttcataaactcgtgagagcgctcactcagggtatcgacatagtttaccatgccgtccagacgcagcatcagttcgctaatttcggtcttgtcgcggaaggtacaaaccgcgccgataatgcgctgcccgctgcgcacgggcacggtgttgctgataagcgtgcggccgcgaacgttgagtttttcgtcgtgccaggccctgccgtggtgcagggcgtcatgcaaatggctgagcatgattgaggacgcgggaatcacgtcaccggtcaacggcgcctgcgtagaggtttcgctcaacagctgccgagcggcctgattaatcagactcacgcgcgagtgttcgtcgacggcgatcacgccctctttaattgattcgagaatagcctgccgctcttcaaacagggtggaaatctcgtgcggttccaacccgaacagaatgcgtttcaggcgtctcaccagaatcagaatccccagcaggccgaccagcgcgccgaatatcaccgtccagaagatgttccagcggctttgatttatctgttgcgttacgtcgtcgagagagatccccaccgccaccacgccaatctgttggtgttgtgcattatacaccggtgtaaatgcccgcagcgcctcgaccagcacgccgtggtttaccgaaacattttcctcacccttaagcgccggaatgaaatcatcgccgacaaaatgcttgccgatgttgtcgggattcgggtgggacaggcgaatcccctgcatattgaccaccacgataaacagcaggcagtcgcgcttttgcacctcgacggcgatgggttgaataatgccgctgtcaggcggcagcgtcagcccgcgctggatctcgggggaggaggctagcgtgcgtgctacggctatcgccttatctttaatgtgcattttggtaaagttttcaatctgcacgtagtacagcagatgcacgctcaacagcacggtaatgatgaccgcacctatcatcaggctcaccagagtgctgagttttaacgggcgtttatgccgcgctggctggggcagtggttgattcatcgtgattattctttcgagacgctatgccgggcgcgcagtatagcgccgatgggcggcaggatggagagcagagtgatccgcctcgcttttgtaactaaaaaacaggaaatcggtattattagttaaaaaactaaaattactttaacttatccataacaatatcttaaattccccgcacttttttacgaccataaataacaaagtgacgatctggaatgaacaaagcaacaaaactacttccgacgctttccctgtcggcattattaatttgctcagcggttcacgctgaaacctcaccagagaaaaccgacgtactgctgataggcggcggtatcatgagtgcatcgctcggcacctggcttgaagaactgcaaccaagctggaaacagctgatggtcgagaagcttgacggcgtggcgctcgagtcgtctaacggctggaacaacgccggtaccgggcactctgccaacatggagcttaactataccctgaacgtcctgacggcagtatcgacgtcagcaaggcgcttgagatcaacgaagcctttatgatttcgcgccagttctggacctctcaggtgaagagcggcgtgctgaacgatccgcactctttcatcaactctacgccgcacatgagcttcgtttggggcgataagaacgtcgaatacctcaacaaacgctaccaggcgctgcaaaaaaccgtgctgttccagggcatgaaattctcaaccgaccatgcgcagatccagcaatgggcaccgctgattatggaagggcgtgacccgcagcagaaagtggctgcgacctggacgccggtcggaaccgacgtcaactacggcgaaattacccgtcagctgatcggtagcctgaagaagaacagcaacttcaagctggaaacttcttctgaggtgaccgacttcaagcgcaacgccgacaactcctggcatgtgactatcaaagacgtgaagagcggcgatgagcgcagcgtagatgcgaaatatgtcttcattggcgcaggcggcggcgcacttaagctgttgcagcaaaccggtattccagaagccgaaaattatgccggtttcccggtgggggctcgttcctggttaccgaaaacccggcgattgccaaccgtcatcaggaaaaagtctacggtcaggcttctgtaggcgcaccgccgatgtcggttccgcatctggatgcgcgttatcttgacggcaagcgcgtcgtgctgtttggcccgttcgcgaccttctcgaccaagttcctgaaaaacggctcactgtttgacctgctggggaccaccacgacccataacgtgatgccaatgacccacgtcgggctggacaactttgacctggttaaatatctgataggtcaggtgatgctgagtgacgacgatcgtttcgcggcgctgaaagagtactatccggacgcgaagaaggaggactggaaactgattcaggccggtcagcgtgtacagataatcaagaaagatgccgacaagggcggcgtgctgaagctgggtaccgaaatcgtgaccgatcggcagaaaaccgtcgccgcgctgctgggggcttctccgggtgcgtcaacggctgcaccgattgcgctgaacgtgatgcagaaactgttcccggaagagttcaagtccgcagaatggcagagcaaaatccgtcaaatcgttccgagcttcggccagaagctgaatgacgatccggcgttgactcagcgcgtgtgggatgaaaccgctgcgaccctgcaactggtgaaaccgccggtcattcagatgaccgagaaagcggccgacgccaaggctcctgagcaggaaacggcggctccagcccctaagcacgacatcgcactgtaagcgttaacccgcgccgccacggcggcgcgggatttatctcgacccaagtagcgccttctcatcctctgggacggcagacgtcaagcaccaactgccgcagccagcggtgagcgaggtccgcctcagcgcgtggatgccaaatctgcgaaatcgtaattccctgcgtttttaccggcagttcaaactgatacagcggcgtatacgcgctctgctggagttgtgccgactgattcaacatcacccgctgattattcaaaaatgaggccggaaccagcgccaccagatctgaggccagggcgacggcgagcgcagcgggaaagcttggcaccactgaggcgatacgacgttccagccccagaaccgccagcgcctcgtctaccggaccggtggtcagcccgcggcgagacgcgacgacgtggctgcaagccgcataacgctcggggtaatttctccctgcgtctcgagcggatgccctttacgcaccacgccgacaaatcggtcgtggaacagcgcctgtatgcgaatctccggccccatttcacccaataccccaatctcgagatcgaccatcccctcgcgcaaatgcttcgaggttttctccggcttggcagcaaagcgcagccgcactagcggggcagcggcggccgcggcggcaatcagttgcgcgccaaaggcttcgacaaaaccttcgttggaacgcagggtaaaggtgcgttccagcgtcgccaggttcagcgccgtcgttgaaggacgcagtacggcccgcacctcaatgacggcgcgctgggtgcgttctcgaatctcttctgcgtagggagtcagtaccatattacgcccggcgcggaccaacaacgggtcactcgttgcctcgcgcaggcggctcagggtacggctcatggccgaggcgctgagcgaaagacgtcgcgccgcgcccgccacgctcccttcgtcgagcagcacgtcgagcgctatcagtaggttaaaatcaggatcgctcatgttgttgtccttgaggcatacgttctgatgtggcgtttcatgcaggtataaagtgcaaacgttgcgtcttccgccttatctggcgtcgggatatagttttaccctctaccagcaaagatcaatagaggtttttccaagatggaattattttctgaccaacccggggacgacggactgccgggccgccagcgctgtttagcgatgatagcggtgatgacctgcaccgcgatggccgtgtttgacggttcgatggtcaacgtcgcgctgccgcagattgcccgcgagctcaatgtttcaaccggcgacgccgtctgggtcgccaacggctatcttttggcggccgccatgacgctggcgatatttgccgcactggccaagcgcatgggatttcgcacgctgtttacgcttggcctgtgcgtatttacgcttgcctcgctgggatgcgccatgtcgacctcgctcgacatgttggtggtgatgcgcatcctgcaaggcgtcggtggcgcggcgacgctgagtatcagcccggccattcaccgctcggtgttcccgacccgtttgctggggcgaatactcgggctgaatgcgttacttatcgccgtcagcaccgcgattgcaccgatcctcggtggcacgctgctgtcgaccctgagctggcagtggctgtttgcgattaatattccgttcgggcggtggcgttggcgctctcatggcgtactatcccgacccaacgggtgcaggaaagtcagtcagcgccgttcgatttcgccggtggggtgctgtcagccgtactgctggggtcgcttatcatggcggcgaatgctttttcccataccgaccacggtgggctttcccgtgagacgctgaccaccgccgccgcgtatggcttgacggcggtgattgccggaatggcgttcgtctggcgtcagcgccgggcggccgagccgctgctgccgttgcagatcttcgcgtcttcgcgtttttcactcgcggcgctgacctcaatgacctcctttgtcagtcaggggatgaccttcgtggcgctgccgtttctgttccagagcgtgtatggctacagcgcgttcgtttcggcgctgctctttaccccgtggccgattggcatcatgctcgccgcgccgcgtgccgggcgtctcgccgacaagttcagtccagcggtgatttccaccgccggactctgtctgtttgccgtgggactgttcttgctggcccagcttcctgagcatgcgcagccgtgggacatcggtctgaggagtctggtgtgtggcctgggatttgggtgtttccaaagcccgaataaccgtgaaatgctggctaacgcctcgcgtgaaaacagcggttatgcctcgggtgtactggctattatgcgcaccttcggccagtgtctgggggcggcgtttgtcggcgttgtcctctcggcctatgcccagccttcgctcgacgctgccggacgtgtgatggaggaagcgcaggctgtccggctttgtctgtggatctcggtggtcgccacgctgctggcgattatcatcagcgtgagccgtctgcgtcggatacgcggtgaggcacacgtctaaatcaggcgcgcacccggcgttttatcgacatcatgtacccggcaatggcacaggcggcgattaaccacggcaccagctgtaccgctttggagtcacttccgctgaggatttgcaggttgttcaccaccagaatcacggtgatgagcatgcctgccatcgacagcagaggagcccaaaaaactttccatgcaccgagattactggccccttcgcggcggaagaacagcataaccgccgccgagaccccaatctgcaacaccagaatgcacagggtggcaatcgccgaaccgaaggcaaagatgtgcaggatagggtcgacatgagtgctgccgaggcctgccagcaacagcagtaaaatcatgctgtgcaggtggctggcgttgtgtggcgtgccgttggtcggatgggtcttgcacagctctttccagataagcccgtcgcggctgatattgaaaatatagcgcgaaatattgttgtgaaaggcgagggtggcagcgaacaggctggtaatcagcagcacggtcatggtatcaaccgcccactggccgacgtactgccgggtaatattaaacacgaagttgcccggatctttcgccgcgatggccacaatcttgtcgaagccgtaggcttgaaccaacgaccagctggtaaagcagaagaaggcggttatcagcagcagggcgcatacggtggcacgtggaaccgtcttctcggggttgcggcactcttcggcgtagatagccgttgactcaaagccgatgaaagaggctattgcgaacacgaaggcgataccgagattgccgtgcagaaaaacggcaggttcgaaagatcccaaatttagcgggccggttttttttatcaggatcatcacgtccatcagcagtacgatagcgacttcggcaatcattaatattcccagcagcttaccgccgacctcgactctttttacccccagcatccaggctatcagggtaaacagcatactgcatgcccaccacggaatatgcgctccgacgtgctgctcaataaactgttggctaaagaaccccagcatggccaccacggctaattgcaccgagaaataggccatcagcgctaaaattgatgccgatccaccccagctttctcccagccctttagaaatataactgtaaaaagcgccagagctttttacgtagcggctcatggtgataaagccgaccgaaaagaccattaaaattatgcaggccaggatataaatgaccggaataccgccgccgttaccggagaatatcgccaccggcagaccgccaaccacgccggtcagcggcgaagcggccgccacgacaaaaaataccagtgaaaataagcccaacgtattttttcttaatgaatgagtgttgctcatcgccagcgccttatttaacagtgaaaacgaattaaaagaacgggggttcttttcgtcatacatcgataagcatcattcatcagccatgcgggcagagatagaaaaaatcggacaggcccgggtgcatcgcaggcactattttggtgctttttaaaatcattcagcatgtcgcaaatattcaatacaccctctgccgaccacgttatttatgactacctctgccgcagaactttgatttaacggcaaagcgtatgacttattaacgttaggttgagagagggattaaaaatgtctgaagcgacgagaatcgattttatctatctgtccgagcaggacatgatccgcgccggtgtcaccgatatgcccgcctgtgttgataccatggaagagatgtttggcctgctttatcggggcgactaccgcatggcggggtctaacaatgactcgcacggtgcgatggtcacctttcccgaaaactccccgtttcctgccatgccaaaacccacggccgaccgtcgcctgatggctatgcctgcctatcttggcggcaatttctgtaccgccggggtcaagtggtacggctccaatatcgccaacagggagaagggcctgccgcgctcgattctgatgtttacgctcaacgatgccgacaccggtgcaccgttggcacatatgtcggcgaatttactgtcggcctaccgcaccggggctatcccaggcgttggcgcgcgtcatctggcgcgtaaagactcgcgggtgattggtctgctcggccctggcgtaatgggtaaaacgaccgttgccgcctttatggccgtttgcccgcggattgacaccctcaaaatcaaaggtcgtggacaaaaaaaccttgataactttatcacctgggtgagccagaccttcccgcaaatcacccgcgtgcaggtggtcgatacgcttgaagaggtggtgcgtgattcagacattgtgacctattgcagctcgggagaggttggcaaccccgagacttatcctctggtgaagcgcgaatgggtcaagccgggaacctttctggcgatgcctgcgttgtgcaacatcgacgaaggcatggagcagcgcgacgtgcgcaaggtgctcgacaacactggcctgtataaagcctggtttgaagaggtaccaaaaccggcgcaccacaccattccggtgatcggcgtgcgctttatggacatgatagccgagggcaaaatcaccgaagacgaggtggaggacatcggaaaaatcatcgcaggtgatgccccgggccgccgaaatgacgaggaaattattatcatgtcggtcggcggcatgccggtagaagacgtggcttggggcacggtgatttatcgcaacgcagtcaaaaacgatatcggcgtaaaactcaacctgtgggaaaccccggtgctgagctaaggctgtgcctttttcttgtccattcaaactatcgggaacaacatcatgacgcgcattgtaaaagtaaaaaccggctcggcctttgaagaacaggccagttattcacgcctggtggcggtagataactggatttatgtctcgaataccgccggacgcaacccacagaccaaagaaattccgcacgacgttaccgaacaaacgctacaggtgttcgccaacattgaagcggctctggccgccgctgacgccacgttggccgatgttatttgctcgcgggtgtttattcagaaccctgaggacgtcgcggtggtgatgccgcttattggtcagaagtttcgcggcattaatccggccagcaccgtgacctgtccgcccctcggttcaaccgtttataaggtggagattgaggtgaccgcctatcgcggcgcctcgcgtgccgaggtagaagcgataaccgtctcgctttaatcatgccgatggctcgctgccgtcagcaacaactatcccgcaagagggtaagctatggttcctgaaataagtccggtgcaaacgtcgccgaagtttccctccgccaccggggtggtgattatcggaggcggtattgtcggcctgacggcggcgttaacgctggccgagcgcaacattcccgtggtggtgcttgagaaggggcgcatcgcgggcgaacagtcgtcgcgtaatctgggctgggtgcgcaaaaccagccgccacgctgaggatattcctttggcgcaggcggcagaccggctgtgggccgatatgtccgtgcgggtgggcagcgacgtaggctaccgtcaggcgggaatcatgtttctggcgcggacgcaggcgcagagggcgatgcacgagggatggctgaagtcggtggcgcatctctccctcgactcaagattactgagcgcgcgggagattgccaatctggtaccgggcgggcgagggcactgggccggtggcctgtatacgccttcggacggacgggcagagccgacgctcgcggccagcgctatcgccagagccgcgctagccaagggggctgtcatcgttgagaattgcgcggtgcggggcttgcgacctctgcgggcagagtcagcgggtggtcaccgaacgcggtgaaatccgctgtgagcaggcgttgctggcggcgggttgtggtcgaggcgtctgctcggcaaccacggcatttcgctgcccacgctgccgctaatttgcaccgtgctgcggacaaaaccgatgcaaggccaacggatattgccatcggcggccctgatttctcttttcgccagcacaaggacggcgggtttatcatcacccagcgcggcgcgctcgacgcctgcctgacgctggatcatctgttattagggcatcgttacctgccgcagcttaaaacgcagcgtgactttttgcgcatctcgctgggcaaggtattcgtaaaggatttggcgctgccgcgccgttggcccctgtcgcggccttcgccgttcgagcaggttcgcaccctcgacccgccggctaacccggcattgaaccgcgaggcgatgaataacctgatggccgcatggccagcgtttgaaaaagcagaaattgagcaggcgtgggcgggcacgatagacgtgacgccggactcgaatccggtcatcgggccggtgagcgcgctgcccggtttgaccgtggcgaccggcttctcgggacacggttttggcacctcgccggcagcggggcagctggcagctgacctgctctgtgcgattccacccatcattaaccctgcgccttatcgttttgaacgtttctgaatttctgcaccctacactgacactctttgctcaggctgcccctctggggtcagcctgaggcctacttttagttatagcggatgcgctcatcataaatttcctgcgcgatgcgtcgctgatagtccagcggcgtcgtacttaccagtttcttgaattcgcgcaggaagtgcgactgatcgctaaagccgaggtcgaacgccaggtcggacgaggtcatgctgccgtgctgatgcagggtattcagggccgactggcagcgaataatgcggctgaaggccttcggtgacatgccggtgtcctggcggaactggcgctggagcgtgcggcaggagtatccggtcaacacctcgagctgctccatcctgatattgccgcgctgctggtggatggcctgaataacccccggcgtgctggcggaagatttacgcagcagtcgcggcgtaaagttacggttaaacagttcgattttccgtgagaacagcggcgtttcaacgatttgttcgagcgcgaggcgcgaaccgggaatcacgtcgaggaagctgaactctctgtcagtgatttcttccgccatcagatcgagaaaatccgggataatgccggggacgaaacgcacgccgaaatagtgatggccgcttatcagctctgcgctgcgcgcctcaagcgtcgtgccgcagacgcgtccggtcggcgaagacgcattgcagtcgaagaggatatcaacacaaccgtccgggaccgccatggtctgactggccgtctgtgcaacgttgaagctgtagaaatgagaaatcgccggatgttcagaggctatcaccgaataatgctgctcggcgctgagcacaaaccacggttgctcggggcgaagtgttaacgcgtgacgcggagttaaaacatctgacatggcgtattcctgtggcggctgaagaaagccacagatctatgcaatccgcgcgccagaaaaacaaaaagccggcaattgccgactttgtgtcattgtcacaggcttattattatttatgcctcgaacatctcggcaccgatataagatccttccttcggggcaggagggacaaaaaatattccagaaccaacatgagaaatatattcgttcatggcgtcagatgcgccaagcttggcctgtagcgtttcaaagtgcgccggatctttctgatagctgataaacagtaagcctgcactcagcatgccttcattgtttaatccgtcagtaaagttgtatgagcgtcgcagaatacgtattccgttattattctcatgagcagccagactgatgtgcgccgtagccggaatgactaaattacccgactcgtcttttttggtgaaatctggagtatcgaattccttggttccgcttagcggagccccagaaaccttgtgtcgaccaaagatattattctgatcgctaacacggtcggtatcccagttttccatgcgcatcatgatcttgcgcaccacctgatagctgccgcgctgttgccaggccgggccgccatcgtcaatccagacaaacttgtcgatatcgtctttttcggtgatgttgcgcgtgccgtctttaaagccgaacaggttacgcggcgtcgattgccctttgcccgccgatgcgcgtccgaatcccaacactgaccagcgcgtttccgctgcgccggtgtcttttgcgatacgcgccaggttgcggattgcgtgataagccacctgcggatcgtcggcacaggcctgcaaagacaggtcgccaccggtcaattctgctttcaggttgtcgcttggcagctgcaccagctcacgcattagcgccggtttgtatttcgcgagaccgaaggcgtcggtgaaaatacgcggaccgaggccaacggtgacggtcagcgaggccggaccgagatccagcgcttcgccggtgtctgcgcccacgccgctgtcgcgaatcggctcaacctgaccgagggtttcacccttcatcagctgggcaattgccgaggaccagcgggccagcaacacctgcaaatcgcgcgggttggtggaagtcatatcgaaggtcatatacatgatatagcgctgcggtggcgtggcgatgcccgcctgctccgcagtaccgtaaaacgcatgttcctgcgacaaatccaccttatcttcagggtcgttgtccgccacggttttattgtgtgcagacccgaccatcggaatagccagcgcgctggccaccgctccttttaataaatttcgacgtgaaaatactccggcctccctggccggatattgtttactgctcattaatcatttgcctccgctggtggccactttctcagcgattttagacaacggctcttgcagcgcctgaacgctacggctcagcttggcgccgtcagccgctttgatttcggcggtgtagtatttgaagccgcctgggactttagggtcacggtaagtgtccagaagcttgttaaccgcatcaaactgctcggcaacgcgtttggtcaagtctggatcgatcttctcgaggcccggttgcaggtaagcgaaggactgctgtgcgccttccacgttgcctgcaaagtctaccaggtcgatgtggctgaaggcttcttcttcaccgctgattttagtgctctgcacttcttccagcaggtccgctgcgccgtttgccagatcttctggtttataggttaatgctttggtcagcttgtcgagctgctgaacgtttttctgcaattctgcggccagctgtttagtttctggggttattttcccgttaccgaacagatcgcgttcgatagcgtggaagccgtgccagcccactttagggtcaaggttggaggcgcgcatgtcaatcaggtaatcgaggttgcccgcgttgtccgtggccttgaagcccggcagcacgaagccgctgacgtcagattcgatacgctcgtagaaaggacgcgcttttgcatagtcttctttggctttggtcagattacccgcgtcgatgtcggttttcagacgatcgaccgcgacgaccatggcatcgaccacgccgttaacgtaggtggagtagcctttcgtgccgtcggccagcagggtacctgcgctgcctaccggctgtgcggcgctcttaccggtgacggagaagttgatcagttcctgttttgcacccgggcaatacagctgataggtgccgccgtccagcgtcagggtgaatttggatgccggcaggcccggagccagattctctttttcacccagaatacggttgtcgctcagcagttcgatttcggtcagcgaggtcgcggttttgttaatcacgttaaaggtgattgggcctgcttttgccgtgttgtggtcgataacgcatgagccgccgtcggcgctggtcatcgtaatattgacctgtgcggctccgtttttaaccggtgccggtgctgcatcctgagagtaggcatcaacagagaacatcagcagtgcagtcagacatccggctgtggtcagagtttcttttctcttaaaagtttttttaaacataacgctgtcctttattgttatcagcaaggtagtacgagttaggtcgatctagaggttctgctattggagaccctgttttttctggtacatctgttgttgtggcaaagcatgagcctggcgaaggcgcttgaggcttcgttgggcaatcaccaggaaaatgatggccagcgccgctaaaaaggccggcagcatgtgcgcccagaaaacgtagctctgaagcgaaaactgttgggccttcaattgggtcatcaggtcctgctggtacgcggcgctgacctgccagccgcagccggtatcaagttgactgcggcgaacggtcagggtgcgcggagactgtaggccgctgcctgtcagcgtcaccagcgtctcgccctgagcggtagacgagagcagggtgccctgtgcgaccctggtggtcaggttgcagttgaccgtccatttagcgttataaggcccggatgctgaccgggattgagtccgataggaatacgattgccgttgaaggccatgacctggtccagcgtcacgatagcgggtgcgccgtcgggtgaggtgctgttctgagtattccattccttcaccgcaacaccctggtaggaatcggttttttggtcagcactctttaggtcggcctgaacgaccttgccgccggtcagcgcgacgcgcagctgatagccggaaccatcggcgttggtgaggcttgcctgacccagcggcctggcatcgttattgaccagcgggcagcatcaggaacgttcaactgaggctgcggatagaggcagaacagggcgacggcggcggcggcgagtgtgcccgcagaggcaaacagcgaacgggtcgctgcttttggcgatggacgcagtttggcaggccagtaaagcactacagcgaccaggacgatgtaaagcagccagccgactatctctatctgacgtggatcggcaggcatacccagcacgccggtaatcagcgcagagcgcacggtgccgggaggaacaagccaggtgaggtcgacgaaacgcgcctgaccgacgtttagccagccagcctcgtgtgcgctgcgcagagaggagatgataaggcctgcggcaaccagaatcaggaacatgccggtgaagcggaagaaacgcgcaagattgatgcggataccgccaacatagagtccccagccgataaccacggccataatgagcccgacaactgcccctatcgccgcccacatggctgactgagccacggagaaggtggcaagcaggaatacgctggtttcgaagccttctttgagtaccgccagaaatgccatgctggcaagggcgaatgcgctagactgactgatggcttgcgccgcttcggtctcgagctctttcttgatgtttttggcgttggtattcatccacattaccatgccggtcacgaagaacaccgctaccagcccgatgatggactccataaactcctggcttgcctgcggcagggcgcgctcggtcaagtccagaccgacgccgacaataatagaaagcaggacggccaacgccacacctgcccacattgcagacaggcttttgccattttttcttagaaaggccgcgatgatactgacgatcagcgcagcttcaagtccttcacgcaacgcgataacaaaggttgctaacactggggcaactccgaaccgtaaatgattcattaaatgataattattattaatatcactatcgttatttagttggaagatctgaccaaaaataaaaagtaaaaaatctttatttcatttccagttgtatcaaattatttcctttgaatttcccggtgcaaaataataaaaatccgctgcctcgagtcgcggggagggagtctcgttgattcacatgggatcctagccttggtgcagcctgcggagaaaaacaccggcgggagagggggatgattaacgctaaaaatcccgttaaaaccacgctatcgaaaaataacggtaatttaattaaccattctcttaatgtttttttaaggttcaattaaagcatttcattgaagtcaggtaattaatctcgaagcatagtcctgataatcgccaatatataagtttcgtttaataaatacccgattccttacgacgttgagggagtcgtgagattatttatttctttcccggcccgcctcctttttatgatgcgccattagtgaattttgctcataaatctattcaagaatagctatttatcaatcaatccacggatgccactattaaaaaaaagctgacgacgccagcgctgagcgttgatgacacacgcccggcgcaggctgatgttgaaagtcaaaccgataaacggagtcaatatgaactacaagaatttaggccgcagcggactgaaagtttccccgctttgcctgggagccatgatgtttggtggtgaaactgatttagaaacgtctaaacgtatcatcgcgaaagccggtgagcaggggataaactttatcgatactgccgacgtttatcacgcgggtaaatccgaagaagtggtcggcaaggccgtggcggcgaaccgtgatgactgggttatcgcgaccaagttcggcttcccgtttgccgggggccaaatcaggtagggcagtcaagaaagtggatccgccagacggtcgaaggcagcctgaagcgcctcgatactgactaccttgatattctttattttcaccgtgcgctgcttgacctgccgctagaagagagcgttcgcgcgatgggcgaactgataaatcagggtaaaattcgctactacggcgtgtctaacttctctggctggcgcattgccgagatgtgtcgcatcgccgaccagctcgggatagagcgtccggtggtcagtgagccgctgtataacatcgttgaccgtaaatcagaggttgagcagatcccttctgctgcacattacggactgggcgtggtgccctatagtccgctggcacgcggcgtattgaccggcaaatataatgccaagaccgccccgccgacagacagccgtgcaggacgcggtgacatgcgcatcaaacagactgaatggcgtgaagaatctatttcgattgccgagaagattgccgcttacgccgccgaacgcggcactaactcaattgccttcgctatcgcttgggtattgaataatcagaatatttcttctgctatcgtgggaccccgcaccgaagctcactgggacagctacatgcagagtctggacgtttccatcacccaggaagatgaagatttcatcaattctttagttgcgccgggccatgcctcgacccacggctatactgatccaggttatccggtcgaaggccgcagaacacgttaactactcaaactgaaggtaatgtaaatgctgacgaaaggctacgctgcactcaaagccggcgacaagctggcacccttttcattcgaacgtcgtgaattacgcgataacgacgtggcgatggaagttctctactgtggcgtttgccactcggatttgcatcaggcgcgcaacgactggggatttggactcttcccgatggtgccgggccacgagattgtggggcgcgtgaccgccgtcgggagcgcggtaaaaaataccaaagccggtgacgtggtcgctgtcggctgtatggtcgactcctgtcaggagtgtgaccagtgtcgtcacggcgaagagcagtactgccgcgaaggtatgacgccgacttatgcaggtcaggatcgtctgacccaagaggttacgcagggcggttattcgaagcatctggtggtgcgagaggagttcatcctgcgcgttcccgagacgctggactactcccgcgttgcgcctttgctgtgcgccggtatcaccacttattcgccgctgcgcacctggggcgtaggtccacagagccgcgtggcggtgactcggtcacatggccgttaagctcgccgcagggctgggggcgacggtcacggtgattggccgttctgccgccaaagctgcagatgctaaagagctgggtgctgacgattatctgatttcaaccgacgccagcgcgatggaaaaagcgcagagccgctttgatttcatcatcgacaccattccggtacagcacgatgtttctgtctatatgccgctgctggacgttgacggtacgatggtgatggtggggcagattggcccaatcgacgaacagccgaccatgccattagtgtttggtcgccgccgtctggccgggtcgctgattggtggaattgcggaaacgcaggagctgctcgatttctgcggcagaaaaaatattctgccggagtgcgaagtgattaacatcgacgagatcaaccacgcgtttgaacggatggagaaatctgacgtgcgttaccgcttcgtgatcgatatgtcttcgttatcggcctaaccgaccacgcctctaaaacggcattgagctatcagtgccgttttttattcctcacagcgcagcgcctcgcgcactcagtgaaaggcgggatagaaaaacgcccctgcggttggcaggggcgttgtcttggctttatccgaacggcgggaaattacttctcgagacgacggataatcgcatcagtaaattcgcgggtggtggcagtgcctttcaggtcgccggtgcgaatattgtcttcgttcagggtggcatagattgctgcacgcagtttggttgcagagtcctgcaggcctacgtgatccagcatcatgccagctgccagcagcagggagatcgggttggcaaggcctttacccgcgatgtccggtgctgtgccgtgaacggcttcgaaaatagcggcatctttaccgatattggcacccggtgccatacccagaccgccgaccagaccggcgatttggtcagaaagaatgtcaccaaacaggttggtacacagcagcacgtcgaaacgccatgggttcatcaccagctgcatcgcacaggcgtcgacaatcatgtcgtccagctcaacgcggccttcgtattctttggccacttcacgcacggcatccaggaagataccggtcagggctttcaggatgttagccttgtgcacgacggtgatttttttacggccgtttttcaccgcgtattcaaaggcataacgtgcaatgcgtttgctgccttctttagtgtttacgccggtagaaactgctgccgctttagggtcgtcaccgatgggaatgtaatattcgtgagagacgtagaaccccccaggttttcgcggaacagcaccagatcgatatcttcgaaacgacccgggatcagggtgctcgcaggacgcacgttggcaaacagctcgaactcttcgcgcagacgcacgtttgaggagcggaagccgccaccgattggcgttgccagtggacctttaaggccaggcgacgttcgcggatactggccagggttttcgccggcagcggatccccttcagcttcgacgccagctacgccagcctgttgcacatcccattcgaacggttgccctagcgcatccaggaccctgacggtggcttcaacgacttccggcccaatgccatcgccaggaatcagcgtagcgggaattttcttgtctagttggtgcatattacctttctctttatttgataaaagggggggggactacgtcaagttaggcaggttaacgccacttctcacacggtgacaacagtaatctgcgctttgctacatctttataacatatctgacacgtatcacataaacgttagccgacaatgctaaagtcaaaaaatgttaccagattcgactaaactttctccccccgccgcgatccccggcaatatttgcttaaattcccgctcgttgttagcgaatgacgccttcccgcaccaacatgtccgaggtgatttcggcaatggtttttgcgccggtcagcgtcatggcgaccttcatctctttttcgataagcgttaacagcgcctcgacgccgcgttcgccgtgggtggcgagggcataaaggtacgcgcgaccgagcagcacggtgtcggcacccaacgcaatcatgcgcaccacgtccagcccgttgcgcacgccgccgtctgccaaaatagtaatatcacctttgactgcctcggcgatggccggcaaggcgcgggcggtggaaggcacgccgtcgagctgacgaccgccgtggttggagaccacaatgccgtccgccccgaaacgcacggcgtcgcgggcgtcttcggcgtcaagaatgcctttgataaccatcgggccgtcccaaaactccctgatccactcgaggtctttccacgaaatggaggggtcaaagttattggccagccagccgatgtagtcctctaatccggtgggcgagccgcgataggccgagatattgccgagatcgtgcgggcggccattgatgcccacgtcccacgcccactgcggatgcgtgcaggcctgccagtagcggcgcatcgccgcattggggccgctcatgccagaatgggcatcacggtaccgcgcgcccggcgtaggcatatcaacggtaaataccagcgtcgagcagcccgctgctttggctcgctcaagcgcattgcgcataaacccacggtcgcgcagcacataaagctggaaccacatcgggcggtcaatagccggtgtcacctcttcgatagggcaaaccgacacggtcgagagcgtaaacggaatacccttgcgcgccgccgctcgcgccgcctgcacttcgccacgtcgggcatacatgccgcacaggcccaccgggcccagcgccaccggcatcgacagcgtctcattgaacaatttggtttcaagattcagtgctgacatgtttttcagcacgcgctggcgtagcgctatctgcgacaggtcttcgacgttgcgttttaacgtcgtctcggtataggagccgccgtcaatatagtgaaacaaaaacggaggcagtatgcgctctgccgcagggcgatagtcgctggaggctgaaataatcatgggtgattctcctgagttcctggttattcctgtccgggcaggcgcgtgatgcgggcctgtctggcttcatcttcgtgttgcgttttaatggtcgagtgaacgaagccgatgtgctccattgccgccagccgcgcctgttcggcgtcgccttgcagaatggcgttcagcagtgtgcggtgctgttcggtgagtttggcgaaaatcgtctgttggctgtacatgcgctgacggctttgcatcaccgaagattgcagcagctcaaagaatccgcgcatggtttgcagcagcacgacgttgtgcgaggcggccgcgatggcgaggtgaaaacgcacgtcggcctgcgctgcgaggtcaggattttcgctttcgttgagcatcagcgtggcatcgaaggcgtactgcaactgttccttgtcggcctccgtagcgcgcagtgcggcgtaccaggcggtgctggcctcgatggagtgccgtgcctcaagaatatcgtagcgatagtccggatcccgtatcacgagctcgcgcagcggggcgacgatacgtgtctcggcccagggctcctgccactcgcgtaaataggtgcccctccccgacggctgaccagcaggcctgcggctatcagtttctggatagcctcgcgcagcgatgagcgcgacacaccaagctcggcggccagatgacgctcggcgggcagacgcatgccgccctcgagctgctgctggtcaataaaggctttcaagcggccgaccagactgtcggcgacgcggggggaggatgcgggcatcgtagtctctcatttctcaggccggtatttattttggtccgaccaaaatgcgctatgtggcgctctgtggttcaaatagttaatgaattgttgaagtgtggcaagaagggcgggcaacaggatgcgtcatctgcgagcaggatcgactatttgagatgattggtaggaccaaagttcattattgggccaaagaccctgacaacatcaggcttatgctaataacttaagaataattgcttaatcagcatttaacgcctcatcaatccaatactacatttagccttcaggttaataattctacagggtagtgaatgtgagtcgtgataacgtaaaaaaacagcacaatatctttgttcatcaggtttccaggccccacggagagccccttgccgagcattttcaatttgttcaacggccgctggaacccttgggagaacgggccgcatgggtcgagaatgtccatttctcagtcgacccttacatgcgcgaatgcatggacggcgactgggagctgaacgaaccattagaggggcgaacgattggacgggtaatccgctctaatacgccggcattgcagccgggcgactgggtctttcaccgcaaaggatggcgcaccttcgcccaggttgaggcagacgaagtgcgggttctggcgccggtcgcgggtgtgcctttgcgggcatggctgagcgtattggggggaacgggactgaccgcctgggtagccttgaccaaaattgcccgtttgcagcccggcgagtcagtgtatatctcttcggcggcaggcggcgtggggtcggcagccgcccagtttgccgcgctgctgggggctaagcgcatcgttggcagcacgcgtaatgcagaaaaatccaggactctgaccgacaggctcggatataccgacgcctttgtttatcagtccggcaaggtaagcgcacagttgcgtgacatcatccccgaaggtatcgacgtgtatctggacaatgtgggcggtgagcagcttgaggccgctatcgccgccttcaaagattacgggcgtgcagcgctgataggtgcggtcgcgcaatacagtgccttaacgccaccgtccgcccctataacctgttcgatgtcgttggcaaaagcttaacgttgcagggttttctggtgcgtgactataagcatctacaggaagagctggaggaatttattattcctcatattcaaagtggcagagtcgtgccgcaggatacggtgacctatggctttgatcatatcgtcgaggcatttctttcgatgttaaaagggggaatatcggcaaggcgatagtcagtatcgaataaatttatcattaaggagattaaatagcgcaatttatattgcgctatttccgctcgtctaaaattaattaatttcttcttcaaatattatgtattgtcataatcaacaatgtttatcaattaaaactatttaagaaaatttggcttagtggttatcttcgagggtaaatgacgttctttattaacgggtgtttcttataacagaggtgagtcatgtcgataatagagatagagagtaaagatatttataatgatactttttttcatacgttacagcatttgaaatcaacggaagcctatcgtcattttctcgagttttcgcgtagcgcaggccatttccctcttgcagattaccagaatgaaaagattgaggtctggtgcagtaatgactatctggggatggggcaaaaccagcaggttatcgatgattttaaggcgtcaattagccgatttggcgcgggctccggtggctcaagaaacatctcgggaaataccaccgcccacgtggcgttagaaaagagattagccgatctttatcagcgtgaaagtgcgttggtatttaataatggctacctggcgaatacagaaagtctgagcgtattgattgggctgtttgataacattaaagtttattccgacgagttaaatcatcgctctattattgaggggcttaaaaagagcaaggtcgagaagtatatattcaaacacaacgacttgaagcatctggaaatagggctttctctggaaccctttgaacgtcctaaaatcattgtgtttgagtctatttattcgatggatggcgatctggcaccggttgaagaaatagtccgtctagccaagaaatacaacgcgttgacctttattgatgaaacccactccttcggcgtattaggggaacggggattaggcctggtcgaagcattgcacgtccgcgacgttgactttattcagggcggatttggcaaggcgattggcacctcgggaggctttatcgtcggcgatcgtgatgcggttgactgcatccgcagtctggcaccgggctttattttcactacctcgttaccgccagccttattgcacgcgacgttgaccagtattaatcaagttgtcgccagtccagaacgtcgcaacaggctcttccagaacgtgcgtcatctgaaaggcgcgttacgtcggcaaaacatcgattttatcgatgccgagagccatatcttgccgattattatccccggtctggccagaattaaagccgtctccgaccaactgcttaagcagttcaagatttatgtgcagcctattaattatccctccgtaccgcgcggacaggagcgttttcgcgtcaccgtgacgcccgatcattccattgaacagatcgaacgtttcgccgctgccctgaaaaatacactcgaccttgcctgaggaatacacaatgagaattgaaaaagttagcgatcatattggcgccgaaattcatgatgtttccattcgcgatattcgtgttcctgaggttcgtgaccgcgtattgcatgcattgcatgagaatgagctgcttattttcaaaggactggatatttcaccggcggaacaggttgagctggcgcaggttattggcgagccggtcccgtttgtgatgagccagtatcgtcatcctgagcatcctgaaattatgatttcctcaaatgaaatcgtgaacggtaaaccttacggcgtgccgcgagtcggcaatttctggcatcaggactcgtcgtataccgataatccgaccacctatacgctgttgcacggcattaatattcccgagtggagtggtgacacattattctcgagtgcaggcaacgtttacgaccggctttccacacactggaagaataaaatagccggacgtgacgcggttcatacggtcagaaaacgctttaaaatccgccctgaacatgccggctattcgattaccgaattgatgaaaaaggccgacgagcttcatcctcccgtgactcatccgctggtaaaaatcgacccctacaccaagctgccttatttgtacggtgccaaggactatctggactacgtgattgggttcgatgccaatgaaaaccacgagtttctcaatctggtcgaagagttagtgacggatcccgcgcacggctaccgccataaatggacccaaggtgaccttcttctgtggaagaccgagacggcctaccatgcggtgactgacgtcgaagacaaccagtcacgcacggttcaccgagtggcggtgaaataatgacgcgtgcaggcatcaccgcgtttgaaactgtgatcccgccgggcagcctgtcccggcaggatattgcacggctctcaggcgtagaagccaaagagttggaggagatccttcccgccccgcgctctcggtatttgctgcggataaggccgactgggagtatgccaccgaggcggcaagtcgagctctggagcagggcgcagtgcccgcctcgcggctggggtggattatctactgtggctccggggtatgggataaacccttctggtcacccgccgccaaggtggccgagcagttaggtgcccatcaggcgcactgctttgaagtggtcaacttttgcaacgcgggggcgacgggaatcgccattgccagcgacagggtcaacgctaatcctgggaaggtcgcgctggtggttatctgcgacaggctaagcggtctgattgaccattcagacgcggcgtcacgcgccttgttcaattttggcgacagtgcgacggccctgctaataggcgttgaccagccgctgctgacgctgaccgcctgcgatatgcaaacagacccttcctggtgcgatatgtatcagggggaataccgtgaagggcgggtactggcgcgtaaaaatagtgtgcgtaaaggcctgctgcaggtgtacgtcgatatgctcagcaagctgctggacagcagcctgtcaaaagcggctactcgtctcgatgacctgcgttttttgctcattaatcagggagatattaacgttcatcaagctctgcttacgcggctggggctgcccgccgagcgcagtgtcttcaactatcacaccaacggtcatctgggggcggtgataactggatagcgctccgccagttgctggcggcggggaagttgaacaagggtgatagactcgcactggccaccagcgccatgggcttcagttggggaatttcgctgttcgaggtaacgcgatgaagatactgattttgcatcaggcaccgtttaagaagatgcgctatgacctggttatcgatcaccaacagcatcaggttacctacattggcctacagcaacatctgaatgatttgcctgaggcgttgcacctgcaaaaaatcgtgctgccgcccggttcagaaaacgctctggtgtcggcggttttggcgcgggtcagcccaagcgacggctatgcgtcgctgttggccctgtcggaatacggcattctcgaggcgtgccagattcgcgccgaactggggatcccggggccgtcctatcagcaaatcgagcgggttcgcgacaaggtcaaaatgaaacagcggatagccgagcagggaacgctgcgttatccccgcttcatcgaaacgcccgaacaggtcgcaggcggcggctggacgggaaaaaccatcagcaagccgcgcgacggggcctccagccagggtatcgtcctccatgacagcttttcgcaggccgttgcgcaccttgagtcaacaaccggctgggccaactatgagcttgaagagtttatcgaggcaccgctttatcactttgacggcgttgtggttgccggagaggtcaagcacctgttggccagccgctatatcaactctccgctgaagtaccttgccggagtgccggtcggctcgtttcaggtggcgctcaacgacactttccgaacgtttatcgaccaggtgattggcgcactggagatccgccgtggctgtttccacatcgaggcattttacgacggcagggcgtgtatctttcttgaggccgccaaccggctgggcggggcgcgtatcgttgagacgcatcaattcagaaccggcgtgcatcttcctcggtggagataagcgactatctcgcgcttcccgcgccgcgtcatcagcctgactcaacgcagtattttggcttcgtgctgtatcccgctcaccaggcgcaggaccccaaaacgctcagcataccggaaagccttttgtgcagcccgcatctggtcagctttcagcgcggaggcgggcagacgggaacgcttacctacaacgaagatctcctcccgttgtcactgattgctcgtgcggactctccacagcgactgcaactcttcctccagcgatgtttaactgaaatttctgcgcactgaattagccctaaacattcactcatccaatcactttggtggagcgacactatgcaatttatcagcgatcgaattattaccctggcggcactctttgacgatttgcagcacaatacgcaatgggcagagacgctcacgccgcaacatgcgcagcagattgacgcgctgctggatgcgacagcgttagagcaggcggtgcagataaggttgggcaatctgcatgcgcttccttggatctactatcccgccaacaatgaagttaccgagctgttgccgatgggggcggtgactttaaggagcgcgagcctggaaggcgaggtgcgcggcgtgctactggcctggctcaccggcaatcaggtcactgtggtcagcccgtttacccacttttggcagcagctaacggcaagggcatcgcgcctgaaggtgtttaccccctttaacattcggctggaggcggtagcaaaagacccggcgacggtgattgttatcccgacgcaggcggcgttgcaaaacgtcggcggccgctatcaggtcactccagcaggccgaacggcctatgcgctgtcgatagatttactcgacgcgtggagcgcagcgctgattgttaaagtgcaccacgcgggggtctcactgagtgaggctcgcagccagctgagtgttgatgaacgtcgccagcgactcgacagtcgtctgcgtttcctgctttacaaaactcgacgtctcccgcattaccagcagacgccgcagccgcaaaccctcgaccaactgcaccagctgccggtgttaaccaaagaagccctggagaaagagtcgccgccttatggccgggggatggcgtcggacgcacttccgtccggcgaagtgctggtgtcggggtccagcggcggcaagacccgttatattccctactcgcgcgatgactggcaaagcatgattcatgaggcggtacagacgctgtatgacgtcgggctggcggcgggcgacagggtggtgaacacgctgtacggcgggcacatgtacggtggaatgttgacctcgtcgcaggagctggcgctgatgccggtcgagtcgtataccgtgggccaaaacattaccccgcaagagttggttaacctgcaaaaaacctttggcatcaatacggttatcggcattcccagcctgctcgacaccttgctcacgcaggcaaaagagatcaatcctcagttcagcatcgaaaaggtgatttacggtggggcgctatggcctgagcaccgcaaacagtggctgaccgagacgctggggatcaagacgtttcacagcattctggcggccaatgacggggcgcagattggctatcagtcaggggctttacagggcgtcgatcattatctggtcgatgattataactatgttgaaatcgtcgatgaccacgggcagccggtcgcggagggagcgcgcgggcatattctgctgaccaattggcagaagtttgaatatcctctaattcgctacaaaatcggtgacgttgggcgcattcaccgacaagtgaacggtgagcgcgtgctcgagtttctcgggcgcggcgacggtctgattgttctcaatggccgtaaggcactttactatcaacaagttgccgatgtgctgtcggaggaaggaatagggcaaattcagctgaccattagccatcggggcatcaggaaacgctgcaggtcagcgttgaggctgcacatccggtggatgcgcaggcgctggagcaaaaattgcaggcggcgctgccgtcgctgcgaccgggtgacggcgtggccatcgagctgctggatttccgcgtcagggtcgttcaggtgcaaaaactggctcgtcatccggtcagtggcaaaattcggctggttgaggacctgcgtttttcaccttccggggaggtcgcatgatccctgccaatacattcccggcgctgggaaatagcttttttcctcaggaaacactgttgatgggggccgggcctgtgcctcagccaccgtcggtgaagcaggcgaatacccacattgccagccacctgggccagagaatgaatgaggtggttgaacaactgaaggcgatggcacgctatgcgtttcagaccaccacccctgggtttttggtctgtcagggccgggttcggcggcggcagagatggccatcggtaatctggttcatcgccgctcgcgcgttttggccatcagctcagggcattttggcttaaggatgtgcgaaatggcgcgacgtcatcaggccaaggtggtgctgttcgaattcgacggcagggaggcatttccgctggaccggcttcgtgcgttgctggagcaacaggtttttgacgtggttacgctggtccacggcgaaacgtcgtcaaccacgctgaaccctgatttgccagagattgccgcgctgtgtaaaaaacagcgggcgctggtggtggtcgatacggtttgtacgctgggaaccaccgaggtattgatggacaactggcagttggacgtggtgttttgcggtgggcaaaagggcctgtcgtccattcccggcgtgtcgttgattgccttctcgaacgaggcgtgggagcgcgtcgttcaacgcacctttacgccaacgcagtggtgctatgacgccctgctggcgaaggagttttggcatcaccaccgttatcattacaccgcaccggtcaatggtattttcgctctgcacgaggcgctgcgcctgctgaacgaagaaacattgccgctgcgcattcagcgtcatcgccagagttcgcaaggcgtacagaaggttcttctgcaatttggtttaacgctggcggcaccgctgccaacgcggctggacgccgtcgttggatttcagctgccggtctggttatcctctgtggcgttgattgatcacctgttgtcacagcatcaggtcgagatttcagcctcattcggttcaccgctgttacgcatcggtcaaatgggcgagcagtgtcgggcggcaaacgtacttcgtttggtcactgcgctgggtgaatcacttgatgcattagggcatcccgtcgacctggtcggcgccttaaagaccgtatcggcgcagtatggccacagggagttgttgcaatatgattaggaattcttttttatggccgttgtttattctggattttattctgcattttagcagggcgctgacgtttacatttttccccatttatctttcacataccctgggttttaatccattactgaccggctatgcgctgggcggaagtctggtgaccgccacgctggtaggggtctattgcgggattctgattgaccgctttaccccactgcgttcactgctgctggccatcgtggtttctgtgctggtgtatagcgtgcttccggcgtctcgtcagtttgcgcaggtgttcttgctgctggtgatcatcgaggtggcgtttaccaccatgcatctgtcggtgaagtcgctgttgacgggattattgccgtcggggcagcgggggcggcctactcgataagttatacgctgattaatatcgctttttgcagcgcgccgatactgggtatcaccctcagtcacttcgctatacgcgctccgatgtggctttcgggggcgctcagcgtagtttctttgctgattctgctggccgtttatcgccgttatcgcgcccatctacggataacgcgtccacaaagcgggcaaaaaaccggtctcaggcagacctttaaggtcttagccagcgacaatcgtctgcaactttttaccctcggtggattgtttagtgcgctggtttatgcacgttttgccacctacctttcgcagtatctgggttatgtggtcagtgagtcggaggcgctgaggctgattacgcttatcgtgagtattaacgccgcaaccgttattctgctgcaatacgtgataggcaaaaggataacccataaaaatatggtgtttagcgtgatgattggcagcgggttgttagtcagtggattgttgttctatcaggtctcggagctgaccattttctggattattgccaccgtgctattttcactcggagaggtgattatcgtaccgtccgagtttctgtttatcgacgccatcgcgcgggaagatatgaaaggggcctactttggcgtccaaaatatctcgatgctgggcggtggggcgaacgctatcctgtttggatatttactggatagccatctcgcccgacctgcggcaatattctatttcctgatggtgtttgcggtgcttggctgtgccctttatctgataggcatccggcaaaagcgggccgttgccgtggtggatgagtcatagcctcaggcttttagcctaaaataaattcaaagttgtcatgcaggcatatctgctgtagctgaccgagcagcgccgtgggcagaggaacgccgtttttgctgcgttcacggtgctgccgattctccggatcgcccgccactaacaccgggcgttgcacatcgcttggcgaggtggcgtgcagggtatcgataatctcgtcgaggtcctgcttaaaaccgttctccgtgcggaaggctttggggtctagcaccaggaagaaatggccaacgttcggcatgccttctttgtcgttggtggcaccaaacgctgcaccggccaatggaccgcgagtatctgcgccagcatcgctaaaccataccccttgtgacccccggtttcctctgcaccaccgaccggcgtcaagccgcctttgggggtctgaaagatgttatttaccgccagcgcgctgtcggtgaccggctgaccgttttcatcaataacccagcctgacggcaaaggtttgctatagaaatcataaaccttgaccttgttggccgcgacagtggtggtggccatgtccagcacgaaatcggcgttttttccggccggggccgaaaaagcaatcggattggtgcccagcaccgctgaggctgcgccggtcggcaccaaaatcgcaccgcgggtggtgctggtgaccaggcctatcaaaccctgtgaggcggcgtagcgggcgtaaagaccggctgcgccaaaatggttggagtgacgtaccaccacggaggcgaggccgagggtttttgctttctctactgccgtttttatcgccagcagcgacgtggcgtggcccagagagtggccgccgtcaatgaccgccgttgccggcgtttcgttgataattttggctcgtgcggctggtcgccacttgcccgcctgaagaagacgatgatagtgcggcagcatcgaaataccgtgtgagtcgatgcctaataggtcggtttcaatgataagctcagccgtctgagcggcaatatcatcgggcattccccagccggtcagaataatttcagtctgctttctaagaacctcagcttgaaaagtgggtaattgacgcattgttatttctccagtgtgaatataatttttgtgataataaatgaaagaaattattttctattttttctttagtgtttaattaagtgaaatatacagggccgtattttttgttattgtttatttattttttctgtggccggtgaacaaccaaggggctgggctttaccccccctagacattagtaggtactgcacgtatttcccaaactaaaaaaatggctatctatttgtgaattttagaaaagcgatagggcacgaaatcattgcttatctgtttttttatcgtagcatgagaattagctccattatcctggctcacggctattgaaactgacgctgtatcattaatggtacagaattattaatcatttgaatcattctccaccgggtgatatcgaattaatcgaataggttatcaacgtgtttgctattaaatcccccttacttatctccatcaacccggtttacgcgcccacgttggtgaatatatttcttcactggctaagaacattgcgattattaccagccagacggcatggaagtcggttaatcctgagcttgaaaacagccttcagtcgcacaatattgcctatcaggttgaatttcttaaaggtgaatgtaccgaagcggcgattgccgaacatgctggcaaagtaaaagcgcaggggccggagttgtattaggcattggcggaggcagagtgctggacaccgcgaaggcggtaggcaatcggctcgacaacgttgccatcatcacgttcccgacgattgccgcgacctgcgcagcctggtcacccgtgaccgtgttgtacaacgaagccggtgggcaggtgggcggcctgccgttgcaccgaatgccggagcgcgtttttgtcgataccgaagtgatcgctaaaagtgacgttcgttatctcaaggccggtatcgttgactcattggctaaatggtacgagttccgcccgtatcagcagaaaagcgcagaaagcctggcgctcaacttcaaggtgcaggcggcgcgctatgcggccgaggtgtttgacgagtttggtcggcaggcggtagaagacaacctgcaccaccgcgtgacgccggcgttgattaaagttatcgatgccaacatcgccgccgcgggcatggccaacagcatgcgggatgaattctcgtcgccgggcgtggcgcacgccattcataaccgtctgacccatcagcccgaggtgcacgactggctgcatggcgaaaaggtgggctttggtctgctggttcagtcatatcttgaaagcggcagtgaaaaagccgacgcaaaactggtcgcgcttttaaagcaattcgatgccccgctgcaacttcccgagctgcacggtaatcgtgccgagactctgcgtgtgattgccgaacaggtcgaattcccggctcaggttgctgcacggttgccgtttgtcttatcgcccgccacgctgttgaaggcgttgcaggcaaccgaaaatacggctcccagcgcgcttatcctgtccgaacgcatccaacgggtgacggtttcggggattgccaaggccaaacagcttaccgatagcctgaaggaggcgggggtcgatattttggatatgaccacgggcgaacccgatttcgacaccccgaatcacgtcaagcaggcggcctatgccgccatcgagcgtggtgaaaccaaatacacggcggtgtcaggcatcaagcctttgcgtcaggcggtgcagcgcaaacttcaacgcgaaaaccatctggcgtacgacatcgaccagattgttatcgccaacggggccaagcagattatctttaacactttcgccgctacgctgaataagggagatgaggtattaattcccgtaccgttctggcccagcttcccggatagcgtgcgttttaacggcgggacaccggtattgctatcctgcccggttgagcaggaatacaagctgacgcccgcacagcttgaacaggcgataacgccgcaaacgcgttggcttgtttttaataaccccagtaatccgagtggggcggtctatgatcggaccgaactgacggcgctagcggaggttattcgccgccatccgcaggtctgggtattgctcgacgaactctatgagcacgtgctgtttgacgagcgcgagcatctcggcctgcttaacgttgcccctgacctgcgcgagcgtgcgctattagtcggcggtgtctctaaaacctatgccatgaccggctggcgcatcggctacgctgcgggtccgaaagcgctggcgcaggcgttggcgctggtgcaactgcaaacgacgtcgggcgccagctcggtgagtcaggccgcggcggtggcggcctttgacagcggccttgacttccttaagcctcaggtcgccgcctaccagtaccgtcgcgacgtgctggttgacgcgttgtcgaaaattgagggcctgaagctgctgtcgccgcagggggcgttctttgtattctgccagtgtgaagggctgctcggtcgccaacgtccagacggcaaagttttagccagcgaggcggacgtggtcgagtatattcttgagaacggtgtctcaggcgtcggcggcagcacgtacggattatcgccttatttccgcctgtcgattgctaccgacaatgccaccgtggaagaggcagggcggcgcatcacggcagccattgagcggctgaaataaacgcgtaaaagcgccgcacttcctgtgcggcgtgtattgttaaccccgattaatgagtgaggcagcgatgcctcactcatttttgttaatgcttgctcacccagacgtcgtaggcgttttcagggatctgtctgaaggtacggaacccaatgccgtgtacataggacgcggcggcaatctcgtcgtccggagcatagagtggaatcaccagcgcctgttgcaggagggcatagttctgcaactgactgtaaatggctttacgtttagcctcgtctagcgtttgtgccgcttcattgagccatgccgagactttgggatcgtcggtgcggctgtagttaatcgctcctccggcgttgatcggcaggtaatggttttcgatgtccagaccgtcggtatcgtcgtgggaattggcgatggagccgtagttaccgtttttgatgtactggaagtaggtgccgggatcgacgtagcggatctttagctcaatccctagacgctggcgggcctgcgcctgtagcgcctccagcagcacgtcgcgctggtcacgcaccgtcacctgagactggacaaccagaatgctcagacgtgcgccgtttttggtacgaatgccgtctgagcccttggtcgtccagcctgcttcatcgagcagtttgttcgccaactgcggattgttgccgtatttgccttcaatgcttttgtcataaagcgggtcgatgggcgaagtaatcccccagctgtgaatgcggtggccgcgataaatagacgtcagaatacctgcaacgtcaagcccttgcagcagcgcctgacgcacgttcagctcctgcgttgggccatctttgacgttcaaaaacagcgagtaaggcgtgccggtattcggcgcactttgatagctatagtctgggttgtcaatgaactctccggcgtcgttaccggagataccctcgatggcatccacctgaccggagagcagtgcaccggtacgcaccgacgactctggcagaatgcggtaggtgatgctgttgaggtaagccggtccctgatgcgcagcattgccggaggaccagtgatagtccgggttacgtacgaagacaatctgctgattcttgtcccagcgcttgaggataaaaggcccggttcccgcgatatcggtaccgcccgacttcaaatctgccgccttccacgaggacggagaaataagtttcaaccagctaatataagacaggaacgggctatagaccgccttgagggtgaccaccacggtataatcgtccggcgttgcaatattggcaatgcgcgagcctatcacgcacattgttgagccggcgcaataggtcaggttctgaagatttttaaagttctcggcaaccgctgaggcattaaatttctcgccgttcgaaaatttcacgtcctggcgtaaatggaaggtataggttttatggtctttactgatttcatagccggttgccagccatggaatatagctgccgtcggctttacgcgccaacagcgattcaaacgccgctcgctgaactaattccactttggtctgcccgttaaactgtggattcagcgtcgtggggttggtttcaatgcccagataaaatctccgccctgttgcggtgtttgcggggaattatcggcggcataaagaggatggagggcggaaataacgagtaaagaaattgcacttattgaatatttcataaagttctcatcaaaagatcaggcaattattcccgagggtgataaataagaagagctaatcatggtaattacggcttattcaaagagacggattattattgatgagcgggttttatgagtaaaatcacaataattgcttaggaatgaaaataaaaagcttaggtttacgttattgagggtgaggaatagaggttttattccctgacgccggaaatactttagcgccagggaagggggtgttcattttcaacgatgatagcaatcaggcggcttttaccgcacggattttcttctcgctaacggcattttcagcatcaggctgctcggcagcgggctggatttctgctttgtctgattctgcgttggcatcagcatcaggaaccttgctggtgcgcagaatatgctgaaccgcctctttctgctcggcaaagaacaaccccatgctttctgcctgcgtttcgtctagctcaaggttactctgcaataaccagtctgagaacgcttcggccatgtcgagcattttgtcataggcatcggcttcttttttactggcaaaagtcattttttcttcaccttttctaacgacaacaaattttgtttcaacagccatggtttactccttatactgtaattatgtacagtgtatcagacgcgcgtgaaaagtgcagcctctgatggcaatttttgtgaggcgagcaaggaattcgccgacggttcgccggggagttgttgttagaaggaataacgtcattctggcattatgttggcctgattcaccggccattcaacggatgcccggcttttttatgcctttttagggcagatgtttccattctgattacaaagacattattgtttattgcgataacaatcactctatctcgcgcccttgcccgcgcgactcgaaggaatggatttaatgaccccacagattgcgttgctggttttaaatacccttactgaagaacatcaggcgagggtggcgcaggcctgcgacgccacctttgcgcagaccgacgaatcgcgcgctaccgctattcgggagaagggcgctgaatttagggccgtgcttaccattgggctgcttggcctgacgcgtgaagagatggaggccatgccgaagctggagattatttgctgcatgggcgcggggtacgaaggcattgatattgaggccgcccgagcgcgcggcatcgtggtcgtcaacgggcgtggcacgaatgataactgtgcggccgaccacgcgatggggctggtcattgccaccgtgcgtaatttccgcagactcgacaaactctgccgtgacggcgtctggcggacctccattcctcagccgaccaacgtgtcgggtaaacgcatgggaatttacggattgggcaccatcggcgagaaaatcgccagacgcgcgcaggggtttgatatggcgattggctatcacaatcggcgcgccaaggcagactcggcctatcgctattttgataacctgctcgacctcgctgcatggtgcgacattctggtttgcgctgccccgggcggtgccgaaaccaaacacagcattgatgctgcggtgctggaaaaactcgggccagagggttatctgattaatatcgggcgcggcagtttggtcgagacgtctctcctcgccgcggcactgcgcgacggggtgattgcgggggcgggaatcgacgtctatgagaccgaaccccagcgccccgaggcattactggacctcgacaatctgttgattacgccgcacctcgccggttggtcacctgaggcgacgcaggcgcagctgagtctgttcctcgccaatcttgaggggcatttcaccggcagcggcgtgctttcaccggtctaaaaaggcgattattcgccaggcttgtctccccgctccggcacttcctcggagaaccgggcggtaatggcatcgcgctcatagccttgtcgctcggtcaaaatgtggtaaagctctggacgacggccgtggatccagcggcgtccggtgctcatggccattaacgacaggtcgaggctggcgcagaccatcgcgtcggctgccgcgcaggtttcgtcaataatgcggccgtaaggatctaaaatcatcgcattgccggtacgcacttcgtcatcgtcagcccccacgccgttgctgaataaaataaacagtccgttgtcgtgggcacgggccggtaaccagcgcagcagccattcccgaccgttcgcgcctctaaaggcggcgataatctcctcttttcggctttctcgctgctcccacagcgcgaccgaaataggcttcataccgtgagggctgcgcgagtgagttccaccggtctgatgaggcgctaacaggatatctgctcccaacagcgccgtcgcgcgcacgttttcgaccaggttattatcccagcagatcagtattcccaccttcacgccccatggggtatcaaaaaccgtgaagctgtcgccgctgctgatggccgggtgctcaaaagcatgcagcttgcggtgggcgtgcaaagtaccgtccggcaggcaggcgacgtaggtattataaaggcgcccgtcatccgcgcgctcaatcagcccggcaccaatcagcatttgatgcctgattgccagagagcgaattaatgccaccgaggtgccggtgtcgagaggttcagccagcgcgtggacctgcgccgacgtcagtttgggcacgtgccagtatcccgtgatgcacatctcggggaaggtcaggattttcacgccctgaaccgccgcctgttcgataaatttctccatcatcaataagttgtattttttattgcccgcctgatgctgaaactgtaccacggcagcttttaaagactttgattcgcgcatttctgttctcctaaggcagtgagagggattatttacaccgctagtagagcagggcggctgataactttataatgaaagcttttcgtctcctgataacttattggaatgcaaaaatgaatctgcggttgctcaaagcctttgtgactctggcagagaaggggaattacgccgacgcagcgcagacgctggcggtctcgcaaccggcgttgaccaaacagatcaatctgctcgagtcgacgattaatgtggctcttttctcacgcggaaggcagggcacctcactgactgcgggcgggaaacggctgctgcccgaggctgagaaggtgctcaaacaggcggggttatttttgcagcgtgccgagggtgtcgcgaagggtgaagagggcatgatggcagtagggtttgggctctcgagctttacctttgcgccgcagtgcattgcgcattttcggcgtcattaccctggggtaaacgtttcgctggaggatctgccgtcttcgcagcaggaagaaatgctgcaaagcggcgtgctgcaggttggttttgttcgcgttccgccgaaagcaccgctggagtatcgcgcgctgttcgaggataggctggtgctcgccgtgccggaagaaagcgcattaaacgtggaacagtggctggcaaaactgccgttactcaggctttacaccgaacgaggccgtggactgaacctgcaaactgacctgtttttgcaggccaatcggcttcatccgtcttcaagccaacaggtagaggacatccagactatcgtcgcgctggtggttgcaggcattggcgttgcgctgctgccgcaaagcgttgcccatattgcgccgacgggatttacgatggtgccgattagcggtgaaaccaccggttggcaggtgggtatcgcctgggacggacaggcggaggaccgtattcgcgacaattttattgcgacaatatttttgcagtaaacccgacaatgccctagaggaagtgatacacgacgcctcgagaaggggagaattaaatgcgtcggcggtgcggcgcgagcttgtcctgctaatttgcgcttatttaagcgatgactcaaaaaaatataaagcctgacttaattgataaggtatacgacagttttaatcgctaacccttgtgagagtaggcgtggcgtcccatttttggaacaggggaggagattgtagcaacagccctgttttttcaaagtgtgcttgcgatcccaatagcagagagtcacttcaatctccccttctcttaaggcaaattcaatctagcattacacataattttacattatctttactaatgtgttcattcgctccatatcataaaaaaattgctttccatcatgagggttagatatgaaattaaaaatggcaccacgcattcttttgtcctgtttggctctggccatgatcccctctgcaaacgcagcgaccgcaaccgggacatttcaggtactgattaccatcctcaaatcctgttccgtaacggcaggggcatcctcaaacattaaccttggctcagtcaatgcgggggcaacggctgccgcaggcaacagcactatctctgtggactgctcaagaaccacgccttattacatcggtctggcaccttccagtaccaatggcggaacaaccaccggctctggctctatgtcctcggttgctaactcaacaaccaacaccgacaaagtgccctatcagttgaaccagacctccgcaacgggtgccgtctggggtaacacagcgacctcgacgaatgtcggtaatggcgtggccggaacagggaccggggctgcacaaacttataccgtctacgcgacagcaaccagcactaactttgcccctgacagctacgccgataccgtcactgtcaacgtgaattactgattcaaaaaggttcaatccaggaaaggagatgacgttgaaattgcttgtgcggcagtttgtttttgcatgcctgctagggacggcggtttggggaaccgaggctgcggccagcggcctgcaggtttccccggtaagtttaacactgacaggcaaccagaatgccggcggcctgtggttaagcaatcagggagataatattgttaacgcgcaggtacgtgtctatcactggagccaaagtaactttgccgataccttgtcctcttctcagggactggtagtgagtccgcctatgctgacactggcacccggcgctcgacagttgatccgtattattcgcgtgggcgcaccgccaaataatgtcgaagacgcctatcggctggctattgatgaacttcctcctgccacgctgcaaaaaaataaattggaatttgtactgcattattcgttacccgtttttattcaaccggcaagcaatcctcctacttcggtaaaattgcaatggacgctgagacatatcggcaatagtgattttttggaagttaataatcagggaaatagccatgctcagctatccgcgattacctatataagccctaatggtgcgcgcaaagtcatcacccctggattattaggttacgttcttcctggaatgaccatgcgctggatactacccgtctctaacgagtatcttaatcgcggtagcaaaattgaagtgtcaataaatggcgaaaaaacgctacaggatttgtaataacccgcgccatctggtgaaggtttttttactgcatggaatattaatctcgtcagggccatcgcggaggtcaatactcccggcggtcagcctgacggtattattaatgacacagcgcgtattcctggtattgacctgtatcttgatgtaaccctaaatggcaatcatttggggttagcccattttggcgatgccaatgggaaattatacgccagcgcaaataccctgcggcagctgggatttcggctgcctaaagaggcaaccgacgccgttagcctaaataatattgaccaactcaagatagattacgacgttcagcaacagacgctgaatatgaccgtgccgttgagccagctggattccgcgaccaccgagctcaacgggcttaatatgcaaagtcctgcggcagccaaatcgcgcggcatgctgctcaactacgatctttatgccgcgcagcaaaacggcaccacggccaacagttttactgaatttcgtgcctttaactccgagggcgtattcagttcgactcagcttacccgctattccgagcagactaacagcggttctcagggcaacgagtttagccgactggataccagctggcgatcgtcattccccgacaaactactggctgtcaccgtcggggataccctaaccagttcgctctcctggtctcgccccacgcgcattgctggtattcagattggcaccgactacagcctgcaaccctatctgcgcaccgcaccgctgccgacgttcctcggttcggcgaccttgccctccagcgtcgaactgtttgttaatggcatgaagtactataacggacaggtgccgtcgggtaattttgccatcaatacgatgccgaatatcagcggcgccggtaacgcacaggtggtgatgacggacgcgctgggcagaacgacgacacagaatttttctttctataacgaccagcagctgctgcgtgaaggactcaaggactggtcggcggaagtgggcgtggtgcgtaaaaactacggttatgcgtccaacgactatggcagcacgccggcggcgagcggcacctggcgctacggcgtgagcaacaccctgaccaccggaatacactccgaggcgacagacgggctggccaacggcggcgtgagcagcgactggatccccggttcgcagagcggcacaatttccacctcgctggccttcagcaccgatcggggcagagcggttccctttacagcgtgggctaccgctgggcgggaacccgtttcagctttggggccagtacaacggcgaccaccggcaattatcacgacgtggcgacgcattatggcactgcgcctcccgcacttaacagcaacgtcgtggtgggttacgacacgggttacctgggtaacgtcagcctaagctacctgcagtttcgctatccgcaggaaagcgccattcgctacgccaatgccaactggttcaaatcggtggcagaaaatgtctatctcagcgccggttatagccaaaatatggatgacaagagcgaccgcagcgtctatctgatggtctccgtaacgcttgataatcgcatcaccgccagcaccaccgtgcagcgtaccaacaatcagaccggctatcaggttaacgccagtcagtcgcagccgtctgagggaggctggggctggaacgtggccgccgaccagcaggattctcagcagagcgggcagggtgaggtgggttatctggggcgttacggtaatgtctacaccggattcaacaacatgccggataaccattatggttatgctggggccagtggttccttggtgatgatgggcggcggactgtttgctgcacgggaaatcaccaatgggtttgcggtggtctccaccgacggcgtgcctgatgtcccggtgaaactgcaaaacaatccggttggcaccaccaataacagcggactgctgctggtgacgccgctgaacagctatcaaaagaacctgttgagtatcgacccgatgagtctaccggccaacacacgtatcactcgcattgaggccaacgcgacgccgggtgaccgttcgggaacgctggtgaactttaccattgagtcggttcgtgccgcccaggtggtgctgaccgacgcgcgcggcaaggttatccctgaaggcagtcaggttcgactcaacggtgaccaaagtcagaccgtgccggtgggcttcgacggtatggcctattttgatacgctgaaacaacacaatacgctgcaggtgaccaccaattccggtacctgttccgttcaattcgattatccggcgaaaaccgagggtattccacagattggcccgctggcctgtaagtaaagccagcgaggtcaaggagtgattaggatgcggtgtagaaatctgttgctgctggcaggattggggctttgcccaacaatgagttatgcgcttgcctgttcggtaaccaacgtacagtccatcaattttggcacggttaatccgctctcgacctccagtagcagcaccagcatgacttttggctacagctgtactcgaggggttctggacggcctgctgaccgccgtcactctgtgctttaacattggtgcctcgtccaacagcgggcaggtcacgacgcgcaccatggcgaataccctcacgtcctccaataccctgagttaccagctctatcaggggacgtcgagcggcacggtgtgggggagccaatttgtggcgggcaccacgcctgcgatggtcaacctctcttcgctggtcgtcggcgttccctcaaccggcagtctgaccgtggctgcggtgttgcctctgccgcaaatttccgccatccccggcagttttcaggatatctattcctccgctactgcgattgtcaccagcaataccgggcttctggtgccaccgggaagttgtggaacgacggtggcaactacctttgccttcaacgtcctggcgacggttgccaagcagtgtacggttacccctaatggcaacatcagtatggggtcggtcaatagtacggcaaccaataccacctcaagcaacacgttaagcgtcgcctgtagcaacggcacggcgtataccgtaggactggtgccatcaaacagcagcaccacggggagtgggtgatggtcaccagcccgagcaacggcgaccaggtcccttatcaactcagttcaacggcggggcctaatggtacggtgtggggaagcgcctcaaccaaccaggtcgcgggcacaggaaacggttcagcaaccagctatactgtctatgccaccgttcccagcgccaactatacgcccggtaactatgcggatacggtgacggttaatgtgacctattagacgtcataatgataaaaacaacgccttgcaggaggtatttgtgagccagtcatcttcttccccgcagtctatggggcggcgcgcccttgagaccgagcctcaatatattaattcaccgatgacctctgccgctgcctttttgattctcgccgttaaggacgacagtcattcgctcgcgaccgttcgctcggtcatcggcagtaccgacgatctgattaaagatgtgcaggtgcgaactatcgaggtgcaatttacctgcaatgtcgggatttcctctcgcatctggaacgcgctgagcggtaaaccgatgcctaaagagcttgcgccgttcaaggaaatcaagggcgctaaacataccgcggtgagtaccgaaggcgacctgctgtaccatatccgcgcgggctcggctgaccttattatcgagtttgaaaaactgctgctggaagcctttggcgacagcgtgaccgccctcgatgatgtcgccggattccgctatttcaacggccgagacctgctggaatttgtagacggaaccgccaatccggtcggccttgctttacccgaggcgacgatcgtcggtgatgaggatcctgattatgcaggtggcagctacgtggtgattcagaaatacctgcataacatggcggcatggcgcgcgcagaaggtcgaaacgcaggaggccatcatcggccgtaccaagtttgacaatgtcgaattaccggacgcaaccgaagggcaaaagtcgcataagacgctgtgcaccattgaggacagtcagggtgagtacgatattttgcgcgacaatatgccgtttgccgtgccgggcaaaggagaatacggcacctattttattggctattgccgttatttatgggtgattgagaaaatgttagagcggatgtttatcggcaatccgccgccgctgcacgatcgtattctggatttctctaccgccgtttccggtgtgaccttttttgttccggcgcgtaaattcttgagcgatctgggggatgaaataaacccttcatgctatgaagcggcatgaagggccgttattgccgcgggataaggggatatttaacgggttgattatttacggtcgagagaaaatttacccggtccggtcacggcgagcagtaataatccccctacgatggcaatatttttatagaaattgatttcgttggcatagtgcgccgcaccggtaagaccccagaaagggtgaccaattaaaccggttgccagagtatacaccgccataatcagcgccagcggacgagtataaaaacctaaaataagtgcaatgccgacgaagaactccatcactacggcaataatcgccgcgacggttgggaacggcgcacctaccgaactcatataagtcactgtaccgctaaagccggttattttctccagaccgaaaataacaaataaaagcatgagcagaacacgagccacaagaatgataatatcgctgtatttagcaacggaaaaataacgcataagtgccttcctggttaattaatttataaactgaaagttactttaactctttcgtcattgcgcataaactccgtaaatgaacaacataatcccataagtggcataatcatgaagtttgacccagcggatatggtcctgtttgcctgcgtagtggaggaaggcagtttctcggggcagcagaacgtctcgacatcccgaactcaaccgtctcgcgacggatttcaacgctggaaaaccaactgggtgagcgcctgctggttcgcaccacccgcaagatggtgattacggaatatggtaaggcggtgctgcgccatgcccagcagatttcagccgaaatggagtccatgctggcactcaccgaaaaccgtaaggccaagccgagcggattgctgagaatatcgatgccgggtgatttctcgcagaacatgattggagcgctgctggcggacttcattgaaaaataccccgacgtgacgctggatatcgactcctcccagcagcgggttgatatcatcagtgagggctatgacgtcgcgctacgtatgggcaatctgcagaatgattctacgctggtggcacgacagcttagcacctttcgcgtggcgctctacgcctcgcccaagtttcttaaaaagagcggggcggtaaagcatccgcaggaattgatgcatcgcgccgtgctaaggcttcgaacgcgtggaggggaggtttccccgtggcaactcacccggggagacgagtcctgggagggcagccctccgatgcgcgcggtggccaactcgccgagtgtgttaatcaatcttgcccggcttggggccgggataaccagtgtaacgacgcatttcgcccatccatttctggaaaatggagaactggtgagggtactcgaagattgggagtgtcccggcgttcccgtgtgggcggtattccccggacggcgcttgatgccctcaagaacccgggtatttatcgacagtctggttgccagctttgggaagtttacctcaacctactgaaccccaaccacggcagcgcgtggttgttcagcttaactctttcaacgcaattcaggcagcgtcaaaaatcacgtacagcttacgcatagtggtctcaaccacccaggtgccctcggtattggcctcgaagaaaaacgagtctccggccgtaaaggtcaatgttgcctcgccgtctggggtaaatgaaccgctgccaccgagaaaatgcatgatctccgcctgcctgaccgaacgccggtagctgcccggcgtacattcaaagataccgctgtcgatgtcttccttacctggaatgaccttctgcaggccggaaagcttaacggcaggggtatcgggcagtccctcaacgtttccccaggattccaacgcctcgatagaggccggttgtccaattttttgtaccttcatttagtgagttcctcagcgtggatgcagtcaggttttagggggttttacgctgtccagcttacggaatgccttaaaaactttattaaacttatgggcgctggattaacacatcagagtgcgaatcgacccgggtttggcaggaagttttgtcggagtgcgctaaggggtgcaaacacaccccatagcgcttttcttgtcgcgggctatttcttcacctcaggctggccgacgctctgtttcctcagttttgccacctcctcggcattaacggctgacgcgctatttccccaactgctgcgaataaaagttaccacgtctgccacctgctggtcgttcagccgccatgcaaaatctggcatagtcaggccggtgatggactcgcgggttaccggggttttagcgcctgccagaacaatgttgatcagtgaggacggatcatcccccatcacggcggtattcccggcaagggcagggaagctttttgtataccctttgccatcaatacggtgacaggcggagcagttattcatataaagcagagatcccggttgagacatatcgccttttatcagcgcagcgctagtcgaatccgcttttgcagaggcttgggccggggcatcggacgacggcaatgatttaagataagttgcaatggcgctgagatcggcatcggtgagatattgcgtgcttttctcgatggcttcgctcatggggccaaatgccgcattcccgtcggtgtggcctgtcttaaggaactcggcaatctcctgcggcgaccagctgcccaaccccgttttgctattgcccgtcagatcaggcgcggaccatccggctagctgaccgccgctaaggaagcgcttatcgtgctgatcaaagcctttttcctgataagccagtccgcgcggcgtatggcaggttccgcagtgcgtaaggccctgcaccaggtaagccccgcgattccattctgtactttgcgtctggtcgggcttatagacatcgctatcgtggaaggcccagtcccacgctgccagtggccatcgcatatttaacggccatggaatatcgctctttctgtttgtctgatgcaccggcttaacctcattcatcaaataagaataaagggcgtgcatatcatcatcgtttattttggcatattccgtgtatggcatggcgggatataaacgatgaccgtcttttgcgatcccttggcgtaacgcgcgtgagaaatcttcatagctgtaattaccgataccggtgtctttatctggcgtaatattggtcgagtaaattgcccccaccggagtaaccattttcaaccccctgtaaaaggcgcggaaccggagacggtatggcaggcagcacagtcccctgcggtggcgatatattcaccgctggcgactttttcctgaaagttttccggggcggccatggcgaatttgcaggaaataaatgcagcaacaaataacgagagttgttttattttcatgtctttattgcctcagttaacgctgaaccagaggccctggatttttaagatattgcgacttgatagcgtcagcggcaaacagcgtggtcgcgccaacgattccagtcgggttgtaggcaatgttttgcgggaagcagcatgcgccgagaacaaaaacattgggcacatcccagctttgcaaatacttgttcacaacgctggtacgagggtcatcgcccatgaccgcaccgccggtagtatgcgtggattgataagggcggacatcgtaatgggaatccaggtttttaaagcccatgctgtaagacagcgggttgagttccttgacgatgttctcgacttttccggccaggaactgggtcagttttaattcattttgctgccagtcgtaggtcatccttaacagcgggagtccgtaggcgtccttataggttgggtcgagatccaggaagcattgcttatacggcatcaccgaggccgaggagccgacgctcatattatgcagatagttgtcttttatagactgcttccaacccgatccccagttaggtgcacctttaggtaataccatctgttgaattggtcttgcgccggtggcgtgggccgaaatactgccgccgccgataaagcctacgtcggagtggtcgaagttttcaccgttgaaattatcgatatagacccccgaagcgcccgccgcggcaaagtggttgaagtacacctctttgccaaagaacagtttggctgcgccatcgatttgataggcatagtttctgcccaccacgccttcaccggtgtcagggttgtaaggttttccaatcccagaaagtaacagcaggcgaacgttatgcagctggaaagcgctgagaataaccagcgaggcaggttgttcaacttcttcgccattggcatcgatataggtcacgcccgtggctttctttccggtggagtcggtaaggacgcgcagtacgtgggagtgggggcgcaattcgaaattactgtactgcttgagcgccggtatgacacaggtctgcggtgacgccttggaatagttgaaacagccaaatctttcgcagaatccgcagtagttacaggccccatctgaacgccgtaggggttggtatagccgccggtgctgatggccgcaggaccggaaaaggcgtgataaccctggttcttgactacgttgcgaaatatctggcccgcatactgatctttcagcggtttattcggatagtcgccgctgcgcggtgcttcgaagggttgcctccctcaataattttgccctgaatattccccgcctggccggaagcgccacaaattttctcaaacttatcaaaatagggctccatttccgcataggtaaagggataatcctgaacggtcatatcagcaggaataaatttagcgccatatttttcagtgatagtggttttaactttcaggtcgctttcaagcggacgccacaacaaaccgttccagtgaacgccagcaccgcctacgccatcgccgggtaagaatgagcccaaacggcggtagggataggctttgcttcctggggtatggcggatagtgaccgtttctttcgaaatgttctggaataacttaagccttatcccataagttaattcatcaacgatgcgtggatagggaaagtcggggtaggtatcacgctgttcgccgcgttctaacgcaacaatttttaatccagtctcggataattctcttgccattacagagccggtccaaccaaaaccgacaataacaatatcaacttgctctttttttatcgtcatttttatgcgccattcttacctgaaatactcaccggacccagcgggtaatgggtgttgggattatccattacctgaacaaaatcagcgcgagcgcccgggaagccgatcattttccacgatgcctgggtgcggtttccgccatgaatagggtcggcgagatagccttctttggtgttctccaacagctggccgaaaaacagtttggaagaaatatcggcaagctggatgtgacccgcctcaagcgcgtgtaatacccctctcgctcggcattttccaggtctgcaaatttcttctgatatttttgctggcagtattgatcggtggctttaattcccctgcgatatatatcacgcggcaccagattagtttgatatcccagctctggaatggtttgctcaaacggcggttgcatataccacaaggcgccgtgaccgtagggcagctccatttgcttatcaatatagacaggcacaccttcgctcaccgcaccgggaccattatcgtcctgaggaattaaccgatcggtggccgaaataatgaagcgccattcctcgtgattaaaaaatatcggtacatattgatagacgaattcatcctctttatttttttcagcggctgaaacactttttgcaataacagttcctgaaagggcggtaactggcaatatcgcaagggaacgttgaaggaattttctgcgagagtttacaatctcaccctcttcttttttcattatctccgacctcaacttattgttataaaaataaataaaagttaaaataaagttacatattttgcgttggcagacttatagcatggggtaatcacaaaaaacacaggctgactggttatgaatgccaacggagcaggttatgaattgcctaatggaatgactttttatggggttttacgcaccggaataacaacagaaggggaggggagatatcaggtcttgacgtatttggttgcatatacttacatgcattaatggatgtaagtgagcttatttagcctgtttttggcgttaggattaactttagtttgagggtaatgcagaaaatgggtatgtcatgggcgagggatttttatattctagataataaaaaaccacgccggagcgtggtttttaaattcaaccgtaaagatggataattaaacgttgaacaggaagttcattacgtcgccatctttaacgatgtagtctttgccttctgaacgcattttaccggcttctttcgcgccttgctcacctttgtaggtgacgaagtcgtcaaaaccgattgtctgtgcgcggataaagcctttctcaaagtcggtgtggatcttaccggctgcctgaggtgcggtagcgcctactggaatggtccaggcgcgaacttctttcacaccggcggtgaagtaggtttgcaggttcagcagctcgtaacctgcgcggataacgcggttcaggcccggctcttccagacccagttcagccatgaactcagcgcggtcttcgtcttccagctcggcgatatcagattcaacggcggcacaaacggcaaccacaacggaaccttcggcatcagcgattgcgcgaactttgtcgaggtacgggttgttttcgaaaccgtcttcgttaacgttggcgatatacatggtcggcttcagggtcaggaagctgaggtagcggatggccgctttgtcttcgtctgacaggtcaagcgcacgcagcataccggcttgttcaagctgcggcaggcatttttccagcgcagccagttcagcttttgcgtctttatcgccgcctttggctttcttctgtacgcggtgaatcgcgcgctcacaggtgtcgaggtcagaaagcgccagctcggtgttgatcacgtcgatgtcatcagccgggtcaactctgttgttaacgtggatgatattgtcgttttcgaaacaacggacaacgtggccaatagcttcggtttcacggatgttggtcaggaactggttacccaggccttcaccttttgacgcgcctttaaccagaccggcgatatcaacgaattccatggtggttggaacaacgcgctgaggtttcactatctcgcacagtttgtcgagacgtggatcgggcattggtacaacgccggtattcggttcgatggtgcagaacgggaaattggccgcttcgatacctgctttggtcagcgcattgaaaagagttgatttaccaacgttcggcaggccgacgataccgcatttgaatcccatgttttatatcaccttaatatcttaataatcaggagcttaaagtaatcatcctgatgtaatgaccataattccgcttattatacacagtttgcgtgttgaactcgatccgcatctttttaaggtaaaatgccccactcttgttattgtcgccttgtttgttttatttaactcaaagtattggatattcgcatgttaactctgaagaacttcagggcggctgacgtcaaaaatgacgtattggccggctttgtagttgctgtctcaatgatccctgaagcggtgggcttctcgctggtggcaggcctgtcaccaatagtcgggctacataccgcgtttatcatcggtatcgtcaccgcgttgttcggcggtaagccgggcatggtgtcaggtgcggcggggtcgatagtggtggtattaatgagcctcgcggcgcagcacggcatgggctacgtactttgggctacgctgtttgccggactgattcagattgccatcggcgtgttccggctgggcaaatttattcgtctggtgccgcttcccgctattcacggtttcgtcaacggattagcgatagtcattatgctggcgcagctgcacatgattgccggacagggatgttgatgtacgggctggtgctgctggcgattgccgtggtcgtcatctttccgaaaattacccgcgttattccttcgtcgctggccgcgctgattatcgtttctgcggtcgcgataggttttcacctgcacacgctgcgggtcggtgatttagcggacatctctggcgcattgccgagcttctcgctgccggctgcgccctttaccctcgatatgctgaaggttgtgctgccttatgcggtggttatcgcgctggtgggactcatcgaatcgctgctgaccatgacggtgctcgatgaaatgggggcaagaaaggcaacggtaaccgcgagagtattgcgcagggtgccggtaatactctttgcggcctgtttggctgcttcgccgggtgcgcgatgattgggcagtcgatcatcaacttcacctcgggcggtcgcggtcgcatctccggcacggtaggcgctattctgctgatcctcttcgtggtgagcctggcggattatatcggcctgattccggtcgctgcactggcgggcattatgctggtggtgtgctataacacctttgagtggagctcgttccgccgtctgcgccgtatgccgaagtctgacgcgctggtgatggtggccgtgaccctgattactattttcaccgatctagccgtggcggtcatcagcggagtgattatctccgcgctggtctttgcctggcagcacgcgcgtatcagcattcgcagccgtcagcagaagggggatttggtgatgtataagctggaagggccgctgttctttggctcaaccgccgccttcgccgagctgtttacgccagagcaggatccgcaaaatgtgatcctggatttctcggccacgcgggtgatggattcaagcggcgtcgaggcgattgataaaatcaccggtcgctatctcgaggcgggcaagactatccgtttacgccacctgagtgccgactgcgtgaggctactcgccaaggcggggccattttgtagccacgagctggacgacccagactattacgttgcggaagataattaccagactgacgataaatcgttgggaaaagaaacgtttagggtaagaacctaacaacgtgggtgagagaggctatgcgtaagttacccctctcacgcttcccccacgccgggggaagcggccttaaacgcttaaccttctgctttaaaactgtgcaaacggttcatcgctttcaataacccgtctttcatcagaatatccgtacagcgcaacgactcgtcaatggcttcatcaatcagcttctgttcgctggccggcggtttaccgagcacaaaaccgacgaccttactgcgatcgccaggatgaccgatgccgatgcgcaggcgatagaagtttggattgttacccagcttgctctgaatatcttttaaaccgttatggccgccgttgccgccacccagtttgatcttcgcgataccgggaaggaagtccagttcgtcgtgggcgaccagaatttcggccggttcaatacggtagaagttcgccatggcgctgaccgccttgccgctcaggttcatgaaggtggtcggcaccaacagacgtacgtcttgcccattcattgataaacgcgccgtgtagccgaagaatttactctcttcttttaactgttggttatgctgacgggccaattgatccacataccatgcaccggcattgtggcgggtctgggcatattcggctccgggattcgccaggccaacgattaatttaatgctgctcacgttcttttcgcttctcgagggaataatctggccgatagtttacccgtgctttgccgccgtgccaaaccgtgcggtaaataaagccccccattacttcagaatcgaatagttacattttataattattcacctttcaatgagatatccccaaagaagcgtaaagatttgtcattttgcatctccacactgtgatcgtgcccgcaacccctccccgacgtgacggctataatttatacaggatgaagtgacgctctttgcttaatgcaaaggaaaatgcaaaggatttaaggaggtgacgaatgaaacgtaaaaacgcagccctgtgcggtaacctgttgatgggagtaggattggttatcatggttggcggtatcgcctatgcggtactcagccaggtgtccaaccttggcatgcctgacttcttcacccacggtgccgtcatgagcatattcatcggtgcactgctgtggttaaccggggcacgggtcgggggacgcgaagccgtcgccgatcgttactattgggtacgtcattacgacgctcgctgccgtaaaaatcatcgccactcctgaccctaaccgctgcgtgaagcgaaagcgcgctgacttaaggttagaaactaaaaagcccggggatccggggctttttattgttaatcgcttttataccgcacggttaaaaggattaatgctcgaacatcgctgaaatcgattcttcattgctgatacggcggatggcttcagccagcatgccggacagcgtcaaagtgcgcacgtttttcagggcgcgaatttcaggagacagcgggatggtatcacacacgatcacttcatcaatcacggagtgcttgatgttctctacggcgttgccggagaagattgggtgagtcgcataggcgaagacgcgcttggcaccgcgctctttcagcgcttcagcggctttacacagggtgccgccggtgtcgatcatgtcatcaaccaggatacagtcacgaccgcttacgtcaccaataatgtgcatcacctgcgaaacgtttgcgcgagggcgacgtttatcgatgatggccatgtcggtgtcattcagcagtttagcaacggcacgcgcacgaacaacgccgccgatgtctggagaaaccacgattgggttttcgagattttgctgcatcatgtcttcgagcaggattgggctaccgaacacgttatcaaccgggacatcgaagaagccctggatttgttctgcgtgcaaatcaacggttaaaacgcggtcaacgcctacgctggaaaggaagtcggcaacgactttggcggtgatcggtacacgcgctgaacgcacgcggcgatcctgacgtgcataaccgaagtagggataactgccgtgatgcggccggcagaggcgcgccggagtgcatcgaccattaccacgagttccatcaggttgtcgttagtaggcgcgcaggtggattggataatgaaaatatctccgccacgtacattttcgttaatttgcacacttacttcaccgtcactaaaacgactgacggcggcgtcacctaggctggtgtataaacggttggcaatacgttgtgctagttccgggatggcgttaccagcaaaaagcttcatatcaggcacgagaagaacctcaggcttgcgtccagagaagatatcggcttgtgatttcaccgggcggtgagcgaaaccacagcaatatacatacgtacaacttacccttcgtccctcagcgagcggcggatgtttccgcgggctgaagtcggtcaggtatacagattaaatctaaaaaattccgagaggctggcaaagaacagacacaaatagcgggaacttgtgactctctacgctttggctgcggctctcatcagctcggcacgtgttttgtgcagcggcgagacgttaacgcctcgggcgacaaaaccgttaatccatgccggcgccttactcaacacctcgttggcggactcctctgtgtcgaattcggcaaacacacaggcccctgttccggtgaggcgcgacggcgcgtattctagcagccatgaaacaagctgttcaacctcgcaaaaacgttttcttgcaataggttcacaatcattagtgtaagttgtgtgcaatagcacatcaatcgagcgttttggcgtatctcgaatcagttcgggatcgccaaaaatagccggtgtcggaatactgacgccaggatgcgcgaccagataccatttttccgccggtgaaacgggctgtaacacttccccgatcccttcggcaaaggcggcgtgtcccatcacaaacaccggcacgtctgccccgagggtaacgcccagctccgccagctcgctgtcgctgaaatggcaattccacagcagattgagcgccactaacgtggttgccgcgttggaggagcccccaccgagacctccgcccatcggcagacgcttttctatctggatgtccataccacacggcgacggcaggccttgctgcgccatacgcgcctgcaacagtttcgcggcacgtataatcaggttctgctcatccggcacaccctcgacggaagggctgagcgtgattttatcgtcatcacggggcgtaaacgccaggctgtctccgtagtcaacaaactgaaacagcgtttgcagattgtgatagccgttggcgcgttgcccggtgatgtacaggaataaattgagtttagccggagatggccaaaaaagcgtcatctcagtttagcgtccagctgtccatttttaacttaatgcgctgcgtgccctgagtcatctcgaggcggttcggcagcggtggtgtgacggtagtgtcgtagctctgatagctgacgctgccgttgaggcctttctgtttatagttgacctggcgcagacggtactggctgtcgaggctgaagtcgctgctgtcgcccggcaggcccagcatccactggcgcatattggacagcgggatcgacatgccggtcagcttctgaatcatgtcatcaggattgttgctggtgtattgtttaccctgattattagtcagctgcgcgttgccgtcctgcactttcagttccatctcggtgctgcccagcggattggtcagcagcaggcgatagctctgtggcgagaattgctgccagaagaagtgcgcatacactttctgactgtcggagatataggcgaaggatccgcgggtctggtagtgatccagttgcttaacctgctgttcgtgctgacgccactgcggcgaagtcgggctggtagaaggaccggtggtcggcgagaaggtcgaacaggcggtcagcaccaggctggcgagaggaagcaggcgaagcaggttggctttatgcattggcataacgagtcgggtcctttcattaaaacaatcttccggggagtctagcacaccttgcaggcggaggctgcccagcgttgaagtttgaaaaatcacgcgatgatgagggaatcactttgcctttgacagcaggttaatgtaatcagctttgtctgggaaaagcggccaattttggtgtaaatgattatcaatctctactgccaggtgccgttaatcacagctttttacaaaaaccggacagatagtgcggtgtggcttttattgatctcactcatcttgtagaatgcgcctcagacgtaaacccatacaaagaaaagtctctttcgactatcgctcccatgaccctacttgcattaggtattaatcacaaaaccgccccggtatctctgcgtgaaaaggtcacgttctcgccagacactatcgaacaggcgctctccagtctgcttcagcaaccgctggtgcagggcggcgtcgtgctgtcaacctgtaaccgcaccgagctgtatctcagcgtcgagcagcaggaaaagctggcgggaaagggcgatgtgcatgagcagctggttgcctggttatgtgattatcatcagttgagcgcggaagaggtcaagaaaagcctttactggcaccaggataacgacgcagtcagtcacctgatgcgcgtcgccagcggtttggattcgctggtgctcggcgagccgcagatcctcggtcaagtgaagaaagcctttgccgaatcgcagcacggtcatgcggtgtcgggtgagcttgagcgtttattccagaagtctttctcagtggcaaaacgcgtgcgcaccgaaaccgacatcggggccagcgcggtttccgttgccttcgccgcctgtacgctggcgcgtcaaatattcgaatctctcgctgaagtcaacgtgctgctggtcggtgcgggtgagaccatcgagcttgtcgcacgtcatctgcgcgaacacaacgtccgtaatatgatgattgccaaccgtacccgcgaacgtgcgcaggtgcttgccgatgaagttggcgctgaggttgtttctttgcaagacatcgacgcccgtctggccgatgccgatattatcatcagttctaccgccagtccgctgccgattatcggtaaaggcatggtcgagcgtgcgctgaaagcgcgtcgcaatcagccgatgctgatggtcgatatcgcggttccccgtgatatcgagccggaagtcggcaaactcgccaacgcctacctttatagcgttgatgacctgcacagcattattcaaaaaaatcttgcccaacgtaaggccgccgcgattcaggcagagtctatcgtcgagcaggaaagctccaactttatggcctggttgcgctctcagggcgccgttgaagttatccgcgattatcgctcccgcgccgataccgtccgcgccgatatggaagccaaagccctggcggcaattgcgcagggtgccgacgtccaaagcgttattcacgaactggcccataaactcaccaaccgccttattcatgccccaacccgttcactgcaacaggccgccagcgatggtgatgttgagcgtttgcaaattttacgcgatagtctcggtctagatcagtaaaatacccgaaaggtcgagtacctgaaggcggccaccacacctgcgtctggatggacgcgggtatagttcttattatcacagggtaaaacactacgcatgaagccttctatcgttgccaaactggaagtgttacaagagcgccatgaagaagttcaggcgatgctcggcgacgccactgtcattgccgatcaggaaaaattccgcaatctttctcgcgaatatgctcagttgagcgatgtttccgcctgcttcctgacctggcgtcaggcgcaggaagacctggtcgccgcgcaggagatgctcgacgatcccgagatgcgcgagatggcgcaggacgaaatcaagcagtgtgaggccaagctcgaagagctcgagaaagaactccagctgctgctgctgccaaaagatcccgacgacgagcgcagcgccttccttgaaatccgcgccggaaccggcggtgacgaggcggcgatttttgccggtgacctgttccgtatgtacagccgttatgccgagacgcgtcgctggcgcgtcgaagtcatgagcgccaacgacggcgagcacggcggatataaagaagtgatcgccaaggtgaccggtgacggcgtttacggtcagttcaaattcgagtccggcggccaccgcgttcaacgcgtcccgagaccgaatcgcagggtcgtatccacacttctgcctgtactgttgccgtgctgcctgaggttcctgaggccgaaatgcctgaaatcaacgccggtgacctgcgtattgataccttccgctcctcgggggcgggcggccagcacgttaacaccaccgactcggctattcgtattacccacttgccgaccggcatcgtggttgagtgtcaggacgaacgttcgcagcacaaaaacaaggctaaggcactctctgtgctgggcgcgcgtattcgtgccgctgaggtgtcaaagcgtcagttagaagaggcctcaacgcgccgcaatctgctgggcagcggcgaccgttctgaccgcaaccgcacctacaatttcccgcagggaagggtgaccgaccaccgcatcaacctgacaatctaccgtctggacgaagtgatggaaggcaagttggatatgcttatccaacctatcgtgcaggaatatcaggccgaccagctcgccgcgctgtccgagcaggaataatggactttagccgctggttgacccaagccgttgggcgtctggcggccagtgatagcccgaagcgggatgctgaaatcctgctcgggcacgtcaccggtcgtacccgcacctatatcatggcctttggcgaaacagagcttagcgacgatcaacggctacagctcgagtctttgctgagccgacgcgagaagggcgaacccgtcgcctatctggtcggcgagcgtgagttctggtctttgccgctgtccgtttctcccgccacgcttatcccgcgccccgacaccgagtgtctggttgagcaggcgttgctgcgccttgagccttcccctgcgcgagtgctggatttaggcaccggcaccggcgctattgcgcttgctatcgccagcgaaaggcccgactgccagataacgggcgttgacttacagcccgacgccgtggcgctggcgcagtacaacggcagcaaactcgctatccccaatgcccaatttctgcagggcagctggtttgtaccggtcgggggcaatccttcgagattatcgtcagtaatcctccctatattgacgccaccgacccgcaccttgcgcagggtgacgtacgctttgaacccgctactgccttgattgcagacaataaaggtctcgccgacattgactatattgtctctcaggcaccggcatttctggtgcccggcggctggctgttgctcgagcacggttgggaacagggagagtctgtcagaactatccttcaggcagccggttttaacgcaattgagacggtcaaagactatggggataacgatcgcatcactcttggacaatggcccgctttgtctcaggccgagttgccctgattttgaaaaccccctcggcctgttttggatgaaaatttcgtcctaaagtgtcgcaggtatgagggacatcccgcaataattgagccttttcggctaacctaataaaaaaggaagcagtaatgtcatcatatatttgggtaaaagatttccatatcgtgtttattacgttaagtatcgcgctctttgtgctgcgctttttctggaaatgggcgaatgccgacatcatgcagaagcgctgggtcaagattgcgccgcatatcattgatacctttatgttgttaagcggcatctggctggtcttcattacccacttttatcctttctccccacaaggttcatggctgaccgaaaagctatttggcgttatcatctatatcgctcttggatttgtggctctagggtcaggcaaggacggcttgcgcagccaaaagacgcgctgggtggcttttattctggccttgggttgtttgtatttgattgttaagctagccataacaaaaataccgctgctaatgggataactatgagcaccattgctgattttgaatttaacactgcgccgttaagtgcaggtgtcatcctggtgacgcaggcaatccgctttgattttaaggccgacgatgtcaatcgccagttacaggcgctgatcgacgaagcccgcagtaaggtacctgaaaacctgagtcaggatcagcagctggaagtactgattgaactgttttatcgcacctggggttttggcggagcaggcggcgtataccgcctgtccgatgcaatctggatagacaaagtgctggcctcgcgtcagggtacgccggtgtcgttgggggtcattttcctgcacatcgcccatgcgcttgagctgccgctgatgccggtcattttcccgacccagcttatcctacgagccgactggcttgacgaagagatgtggctggtcaatccgctcaacggtgaaacgcttagcgagcacgttttagaagtgtggctgaaaggcaatcttggcgttagcgccgagatagaggacgaagacctcgaagaggccgaccacaccatgattatccgcaagatgctcgacacgctcaaagccgcactgatggaagagaaacagatggagctggcgcttagcaccagcgaagcagtgctcgagttcgatcccgacgatccctatgaaattcgcgatcgcgggcttatctatgcgcagctcgactgcaatcacgtggccatctcggatttgaattatttcgtcgagcagtgcccggaagatccgatttccgaagtgattaaagttcagattcactctattgaacaaaagcagataacgttacattaatgagctcggcgtgaaccgggcgataacgcttacatttgtaccattaatttattgattaaggccaaagcatgaaacataaagtggttagcattaaggacatcaacgtagcaaacgatttgccgtttgtgttgtttggcggcatgaacgtgctggaatcacgtgacatggcgatgcgcgtttgcgaacactacgtgaaagtgaccgacaaacttggcattccttatgttttcaaagcctcttttgacaaagccaaccgttcttccatccactcttaccgtggacctggccttgatgaaggcatgaagattttccaggacctgaaagcggcctttggcgtgaaaattatcaccgacgttcatgaaagctggcaggcacagccggttgccgacgtggttgacgtgattcagctgcctgctttcctggctcgtcagactgacctggttgaagctatggccaagactggcgcggttatcaacgtcaagaaaccccagttcgttagcccaggccagatgggtaacatcgtcgacaagttcaaggaaggcggcaacgatcaggttattctttgcgatcgcggaagcaactttggttatgacaatctggtcgttgatatgctgggcatgaacgtgatgattaacgccactggcggccatccggttatcttcgacgtgacccacgcattgcagacccgtgacccgttcggtgctgcttctggtggtcgtcgcgcgcaggttgccgagctggcgcgtgcgggcatggcggtgggcattgctggcctgtttattgaagctcacgaagatccggctcacgccaagtgtgacggtccttctgcgctgccactggacaagcttgagccgttcctggtgcagatgaaagccattgacgacctggtgaaaagcttcccggcgctggataccagcaaataagcattgctgacgccttaatatggatgtcagttaacgagaggcgaccttggggtcgcctttttaatgttatcgatactcgtgagatataaatggaaacaagctttcttatcgttccgggttataccaattcaggtcctgaacattggcagtcctatatagaaagaaaatactcaaatgttagccgtgttgttcaagatgactggaataccccagataaagagacgtgggttgcctgtctggacgcttttataaaacaaacacccggcaatattgtgctggtaggccacagctgtggggctgtcgcggttgcgcagtgggcaagcttgtattcggaacagagagtcaaggccgccgttttggtggcgcctgccgacgttgactcagccactgcacttgaagaaatccgtcaacagaggccattaccggcacagagaatcgcttttccgacactgctcatttgcagtgataacgatgagcatctttctctggacaaagcccacacgttggccgccgcgtggggaagcgaaataaccgtcatctcaaaagcagggcatatgaataccgcagcgggttatggagagtggattgcaggtgaggaaatgatcgagaatttcacgggtgaaaaactgatcgagagtcgtgcaacgttgtgcaactgaactccctaaactttcccactgtgttttgctaattttaccgtcatgaaacgcagaaaaaaaggccctgattttcatcagggcctttttttaaatttggcggtgagagaggggttcgaaccctcgatacgctttcgcgtatacacactttccaggcgtgctccttcagccactcagacacctcaccgtggcgttgctctgctgtagcagctcaacggggcgctactatagggagacaaccattttgggtcaaggattatttccgaaatgttgactgtgtgcttaggagttcagcaatctgctgataaattactcgcttagggtgctgcggcgagcagaaacgaaaaagggtccagattttcatctggaccctttcgcataatatggcggtgagagaggggttcgaaccctcgatacgctttcgcgtatacacactttccaggcgtgctccttcagccactcagacacctcaccgtagttggacaaacacactgtgcttgctcaacggacgctaatgtagggaattctgcccccagcgtcaacactcttttagtttttccgattcgtttagcgatttttaaagcaatttgctgatttacagaacaaaaaggctcatataacgacagcctcggggtgatttacccctgtttcagccgcagtttgttcttctatttttgcccgttttggcgggaaaagcatcgtgtggttaaaagaaacaatttattcaaagaaatgctaggaattttgctaacgacatcggtataacatcgtggcactcaaaaaccagagcataaaaaaccgccgcgtttttgagcagccatcatccatgcatttttcgattgttcaacaaggcagtacaggggtttgacttgagttatttagaaaacacatcacaccatcgttcggtggtacctgaggggtccggcgcactgttctttatccagactttctcgacgttgggctttgcggttctttattccacgctggtgctctatgccactaaacgtctgggattcagcgaaagccaagccaacaccatcatgggcgtcttcggtgcctttaactatggcctgcatatgttcggcggctatcttggcggacgctacctcagcaaccgtaacctgtttgtgcttggcatggtgctgcaagtcattggctgtgcgctgattgccctggcaggcgttaccgggctttactggggactggcgatgttcctgaccggcagcggactgaacgtgacctgcctgaacatgatgctgactcagcgtttcaagccggaagatgaccgccgtgaagccgcgttcttatggaactatgcaggtatgaacctcgggttctttattggttttgccgtcgcgggctattatcagctgacggaaaactatcgtgcgctgttcctgtttgccacgctgggcaatgcggtcgctatcgtgctgaccctatcgcgttggaatatcctcaaggatatcaatacgccgcttaaccaggtcaattcacgtcagcttatgcagcgcatgctggtgggcattgcgattctggtggtgctggtacctgtcattcgcgttttgctgactcatgccgcctttagcagctactttgtggttgtgcttggcgcgattattttcatcatcatgggcagggtgaccgctcgccatcgtcagcaggatgaaaaaagccgcatgaaggcttacctgctgctggcggcgggttcgctggtgttctggacgctctaccagctcgcgccgatgggcctgatgttgttctccgagaacaacatcaacctcaacgtttacggcttccgcgtcgcgccacagtggatccaggacatcaataccgtggtcatcgtcgtcggcgggccgctgatggcactgctgttcaagcatttgcgtcagcgtggctggcgtatcgatatcccgatgcagttctccggcgcgctgttctgcatcggactgggcatgctggtgctgccgctgggaattcattttgccggcagtgacggcctgatggcgttcaaatggatcgttattagctacgttttccaaagcattggcgaactgatgatttcacctatcggctatgcgatgattggcaaactggccccggctcgttatcagggcgtgatgatgggttgctggatgatggtgaccggcgtcgcttccgtgctggcgagctatatctctggcctgatgcccaccaataccggcagcacgccgctgctgaccaatccgggctacagtgaagtgttcaacgtgctgggctggggctcggtcgcgaccggcgtcgtgctgatgctgcttgtcccgctgctgcgccgcttgatccagcgcgtacctgcgtaaatactgcttccgaaagccctgacaatcagggcttttttttaaacaatttttgcaagcaaaggttgcatcacggtgattttagaggaaatctaacagggcaaaggaggctacaacatgaacatcatcttctatcaccctaaaacagattcagagccatggattgagggcattcgccaccgacttcccgaagctaacgtccgcgtctggcaccgtggcgataccgcacccgccgactacgcgctagtctggcatcccccgcaggaaatgttggctccacgcagcgacctcaaaggcattttcgtgctgggcgcaggcgtcgacgccattcttaatcaggagcatcgccacccgggtaccttgcctgcgggtgtgccgttgatccgtctcgaagacaccggcatggcgctgcaaatgcaggagtacgcgctggcgagcgtgctgcgctacttccgtcgtctggacgagtatcagctgtttcagcagcagaaacagtggcaaccgctgcctgcgcatcagcacagccatttcacgataggtattcttggtgccggtattctcggtaccgcagtcgcgcaaaagcttatcgatcttaaattcaaggtacgcagctggagccgtagcccaaaagtgctcgacggcgtggagagtttctacggcgatgaccagctcgatgatttcgccagcggctgcaagctgctgattaatctgctgccaaatacaccgcaaacggtcgggatccttaataaaaagctgttctccaacctgagcaagggcagctatctgatcaatctgggacgcggcatgcacctggtggacggcgacctgttaaaggcgctcgacgacgggcaaatcgcggctgccacgctcgacgtatttattgaagaacctcttcagcgcatgcacccattttggtcacatccgcgtgttagcatcacgcctcatatcggtgccgatactctgccggacgaggcgatggacaacattgtcgccaacattcaggctatcgaggcagggcgcaaaccggttgggcaggttgacctcacgcgcggatattaaccccacgccgagtcagccacacagatctgctaagcttttattgccgcccggccccttaccgaggcggccaaaaattcaggagaagtcatgtttccggtcgacttacatatgcacaccgtggcaagcacccacgcctacagcacgctgcacgactacattgatgaagctcagcaaaaaggcatcaagcttttcgccatcaccgatcacggccctgacatggccgacgcaccgcattattggcactttatgaatatgcacgtctggccgcgcgttgttgacggcgtgggtattctgcgcagcattgaagcgaacatcaaaaacatcaacggtgatatcgactgcaccggaccgatgctcaccgccgtagactttgtgattgccggattccatgaaccggtcatgccgccggtagataaagagacccatacgcaggcgatgattgccgcgatggcgggtggcgatgtgcatattatcagtcatccgggcaaccccaggtatccggtcaatattcccgcgattgccgctgcggcggcgaaatacgaggtggcgctggagctcaacaactcctcctttactcattcacgtaagggcagtgagccgaactgtcgggctattgtcgccgcagtgaaagaggcgggcggctggctggcgttgggctctgattcacacattgcctattcgttgggggttttgagcactgtgaacgtataattgacgaagtgggattcccgcacgagcgcattctgaatgccagcccacgtcgttttctggactttctgcaaaggcgtggtcgtccggcaattgcagaatttagtgaactgtgacattgtcacgcaaatttttgctatgccaacgttaatcaggttctgactatgaatgagttttcgattgtatgccgcgtgctgggcacgctgttttatcgccagccgcaggacccgctgctggtcccgctgtttgggttgatccagcaaggtaaactgcgtgagcattggccgctggaacaagacgccttgctgcttcgtctacagcaaagtgccgatccacaggcgctggccgccgagtttaaccatttgttcgtcggtaccggctgtgcggtttcgccttatcgcagcgcctatgtggaaggcgactccgagcaggaagtgcggactttcctcaagcagcgcggtatgccgctgggcgaatctccggccgaccatttcggttcaatgctgcttgccgcttcatggcttgaagatcagtcgcaggaagacgaagccgcggcgcaaatcgcgctgtttgacgagtacatgctgccatggtgcggcaagtttctcggcaaggtagaggcccactcgaccagcggtttttaccgcacgctgtctgagataagccgcgaagcgatcaccgcaatgcgcgacgagttggaagaggcactgccggaagacatcgagaacggcgaagaagacgagcagtaatcacgccattcgcacataaaaaacgcctgaaggtgatgcccgacaaggggcgtcacgcactcaggcgtttttctttcagcagaatttagtcagtgaacgggataaccagctggcccggtttcacttccagccctttggccagttttttcgccatcgcttcgccttcactgtgttcgccgttcagcacgtaggccggtttctggtcgaagtaggacttcagtgactgatttaggtaaggcatcaggcctttaacgatcgaatccattttttccggtttaacggtgtagtcgaccacttccatatctttcagatagatagcaccttcatctttgttatataccggcgtcgctttcagcgtcagtgtcaggtcggctttctgagcgccaaacagcgagctgacgtcgatgtcggcatcgcccgagagtgtcactttacccggctcgctgcggccaatctggctgctgaggttggtcagggtaatgtgtgcgtctaccaggccaggcacaccgagctgcttctggaagttattgtgtttttgcaggtaattattcacttcctgttcactcagcgtgtactgagtcagatggttgcatccggcaagcaggccggcaaaaatcagggcagcggcccctaaaaataactttctcatgacttcctcgatgacaattccaaggcgcacagtatgccctgtttgggaaaggtgagggaagggttacagcgtatagaaaggtaagggtcgcaccgaaagtgcaacccttgggttaaggaaaggttaactcgcgaggcgggtcagcaggtttatctgcgtttgtttcgccatgttgtcacgataggccaaaacacgagtaggcagctcgacgcctttgacgatcgacagcgatcgcaggaccgggaacaggtgaatgtcgtcctcggagagctcgccattcacggcattcggctcttgaatgagtttgtcaaggtcacgcaaatcctgattgattttctttaccagaccgggcgaatgttggagatgttccttaaaatcgcccagttttgcctgtttcttgtcggtgaaatattgacgtgcctgcggcgtggcaaactcttcgaagggggcggcggcgaagcgcgggatgaacagcttttcagtatattccgagacgtggcgcaaccaggttgctaccgccgcactaattgggccggtcagcaggggtttatggtcggaattatcaatatattgaacgatatccatgctttcaggcatgaagctgccgtcctgtttttgcaggattgggaccacttttttcccgaccatcgaggttggcgttttttcgtcatcgttcagcagggctttcacctcaaccggcagattcttaaggccgaagatcatgcgggccttgacgcagtaaggacagtgttcataaacaaataacttcatgatacttggctcctttttatactcggctaaccggggtgtagggaaggtcgattagccgttttctcttctgtcaccagagatgtttcaatctgtgagtatggtgaagattctccctgagatcaaacgcagtcagccaaagccgaggcctttcggcgacttaattttcgccgagcatcgcgggttcgatacgacgcagctgaaactgccagtaaaggcctgccagcgtgatcagaccgacgatgccgagcaggatccaaggcagctccggcagcgcgagtgcgcgaccggtatcatacatccagccaccgccggtataaccaatcgcaccaccaatcgccagcccaaggcggctgaaacccatatagctgccgcgtgcacgcgggtcagccagcgaggcgcccaaggtttctcgcgccggttcggcaataatcgaaccgatatagaacaggccaatcaacagcagcagcggattcagcccactgaccataccgacagggaacaggctaagggtcataatggccaaaccacacatcaggcgtttttccaggctgaagcgcttttcgctccagcgggcaatcgggtagagcaaagtgagcgacagcgccgcttcaatggcgtacatccatttcaccgcggtaggcgtaccggccatgtcattgaccgcgataggcagcatcagcatgacctgtacggttagcatgtaatagccggtaagcgtcaggacgtagctgataaagcgtttatcgcgcatcactcgcatcatgccttgtcgcatcggcgcacggcccgccgagatacggtaggcgggcaggaagacagcgttgaatgcggcggcgagcacaaacagtcctgcgccaacccagcagacgaaatgaaaattatattgcagcagccaactgccgatcagcgcgccaatgaccgcaccggcgctgtcctgcatcattaataatgagaaaaagcggctgcgttcgtgagggcggatcagcttgataaccaaggcagtgcggggtggatcaaacaatgtgccgccaaggccggataagacgcatgagcagatgagaatccacggactgtctgccagcgccatggtggcgaaccccgccgcacgcagcagcatgccggtgatgatcattggcttggcgccaaaacggtcggcaatggcaccgccaaagatccctagcccctgctgggtaagctggcgtagcccaagcgcgagccccacggccatcgccgcccagccaagctggtcaacgaagcgaatcgaaataagcggaaaaacgacgaaaaagccgagaattaccaaggcattgtcaaacaagaggaaaaactttcccaagcttcgcgcttgcgataccagagacatgcgtcaccctgagcgattattggcatccattccgaaagatgctgagatgatattaaccgccttagtctgaacctcaaacaggcaattagatagggcgctatagataatatttttttatcgtcaagacgctttaggactggcaaaatcaaagacgcagcgctgaaaaacctgaataatttaacggctgattcacagagagtggtgggctcgactatgatgcaaagagaagccgtgcgcaatatagcagtccacggcaaagaacggcctctgtttcctataaaatgttcttatcgagccggtcaaaatgtggagggaagggatgtttggctatcgatcagcggcacctaaagtgcggcttactacggacagaatggtactgcggctggtgtacgagcgcgacgcccatcgcctggccgattattacacggaaaaccgcgcctttttgaagccctgggagcctatcagggacgaaagccactgctatccttccggttggcaggcgcgactgggtttgattaacgagatgcaaaaacagggacggcctactattttatcctgctcgaccccgatgagaatcacgttcgcggcgtcgctaactttagcaacgtgctgcgcggttcttttcacgcctgtttcctcggctactcgctgggtgagcagtggcaagggcaggggctgatgtatgaggcgttgcagtcgctgattcgctacatgcagcgccaacagaagatccaccgcattatggcgaactacatgccgcacaaccaccgcagcggtaacctgctcgaaagtctcgggtttgagcgcgaggggtatgcgaaagattatctgctgattgacggaaaatggcaggaccacgttttgatggcgctgactgacccacagtggcagccaccgcgatgataaggaaaggaaaaccatgaagtatgaattcagcgccaaagaagcgcgagtcatcggctgtatgcttgaaaaacagattacgacaccggaacagtatcccctgagcctcaacagtcttaccaccgcctgtaaccagaaaaccaaccgcgagccggtaatggagctcagcgagtccgaggtccagcagacgctggacctgctattgcgtaagcacattattcgttcgctcagcggcagccgtaccatgaagtatgagcaccgtttctgtaactccgaatttggcaatctcaagttttcccctgccgaggtggcggttatcagcacgctgctgctgcgcggcgcgcaaacgccgggtgagttgcgtacccggaccaaccgtctgcacgactttgccgacgtcgccgaggtggagctgactctcaatacgttggcaggccgtgaagatggcccattctgcgtgcgactggcgcgcgagccgggcaagcgcgagagccgctatatgcacctgttcagcggtgaagtcagtgacgcagccggtgaagacgaaatcttcagcccagcaagttcgcagagcgcctcgcgtgatgaactggcagagcgcgtcaacgtgcttgaaaccgaagttgccgagctgaaagagcgtctcgagcacctgctggaacgattggccgactaaggagagtgagtgtgagtaaacttcgaattggggtggtcgggctgggcggcattgcgcagaaggcctatttaccggtgctcagtcaggcgactgactggacgcttgagggcggcttttcacccagtcaggtgcgggcgcaggcggtctgcgacagctaccgttttcgctgtttttcgcagcttgaccagctggcaggcgcctgtgatgcggtattcgtccacagtagcaccgactcacatttcagcgtggtcagcgacctgcttaacgccggggtgcatgtttacgtcgataaaccgctggcggcgacgctggaacaggccgagcagctggtcgagttggcgcaacgtcgcggcaaaacgctgatggtcgggtttaatcgccgtttttcgccgctgtaccaacagctcaaggtgcagctggccgcacaggttgatgcaccgatttctctgcgcatcgacaagcaccgtgcggacagcatcggtccgcatgaggcagcatttaccctgctggacgactatttgcacgtggtcgataccgcgctgtggttagccaatggcgacagtctgctggtcggcggacagattgattgtaatgagaaaaatcagctgatctatgccgagcatcagttcacgcggggtaagacgcgtatgactactgcaatgcatcgtcgtgccggaacccagcgcgagtcgatacaagcggtctgtgacggtgcctggtatcaggtggacgatatgcgccattgggttcaggagagtctggcgggcagggttgagcagccggtcgccggttggcagacgacgctggctcagcgcgggttcgagggggctattcggcattttatcgactgtgttagccaccaaacggcccccgaaaccagcggtgaacaggcgttgctggcgcagcgtgttatcgaaaaattgttgcgctaacaacgattaatccgataatttccaatgggaaacaatatataacaactgcctgtagctattgtatttttgatacgtagactatacgcactttcgaaccttgccggggcttctacagggagtttaccggccacaagaaaaagtcacatgaatctactgaagtctttagccgccgtcagttctatgacgatgttttctcgggtacttggatttgcccgcgatgccgtagttgcccgcgtgtttggggccgggatggtcaccgatgcttttttcgttgccttcaaactacccaatcttctgcgacgtatttttgccgaaggcgcattctctcaggcctttgtgccaattcttgccgaatataagagccagcagggcgaggaggcgacgcgcacttttgtggcttatgtctccgggctgctgacgctggtactcgcgctggtgaccattgccggcatgtttgccgcgccgtgggtgatttacgtgactgctcccggttttgccgacacgccggataagttcgcgctgaccactgcgctgctgcgcgtgacgttcccttatatcctgctgatttcgctcgcctctctggcggggctatccttaatacctggaatcgcttctcgataccggcatttgcaccgacgttcctgaacgttagcatgctggtgtttgcgctgttcgccgcgccgtatttccatccaccggtgatggcgctggcgtgggcggtggtggcaggcggcgtcttgcagttgggctatcagcttccgcacctgaagaaaatcggcatgctggttctgccgcgcctcaaccttaaggatgcgggcgtatggcgcgtgatgcgccagatgggcccagccattcttggcgtttccgtgagtcagatttccctgataatcaacaccattttcgcctcgttcctggtgtctggctcggtgtcgtggatgtactacgccgaccgcctgatggagttcccgtccggcgtgctgggcgtggcgttgggcaccatcctgttgccttcgctggcgcgcagcttttccagcggtaaccataccgagtacaaccgcctgatggactggggcctgcggctgtgcttcctgctcgcgctgccaagctccgtggcgttggggattctggcaaagccactgaccgttgcgctgttccagtacggtaagttcaacgcgtttgatgcctcaatgacccagcgcgcgctggtggcctattcggtagggctgatggggcttatcgtggtcaaagtattggcgccgggcttctattcgcgtcaggacattaagactccggtcaagattgccattatcacactcatcatgactcagttgatgaacctagcgtttatcggcccgttgaagcacgcgggactttcgctctctatcggtctggcggcctgtctgaacgcttcactgctttattggcagctgcgtaaacagaagatcttccagcctcagccgggctggacgagtttcctcatccgcctgattatcgccgttctggcgatggctgccgcgctggtgggtatgatgtacgtgatgcctgactggtcggtaggcggcatggcgatgcgtctgttgcgcctcgcggccgttgtggtcgtcggcgtgattgtctacttcggtgcgcttggtctgctcggcttcaagctcagggactatgcgcgcagctaattgacgccaaggtaaaatagcataaggccccgaatcgatgttatcgcttcggaggcttttgtttagccataaaaaagccgctttcgcggctttatgatttctgacggtagagcgagttacatacgctcaacggtttcaataccgagggtatcaagaccggtcttgagggttctctgggtcagcagcgccagtttaaggcggctgttacgcacggtttcgtcttctgcgttcagaatcggacagtcttcgtagaagccggagaacaggcctgcaacgtcgtacagataggcacacatgacgtgcggtgtcccttcgcgtgcaacggcagtcagcacttcttcgaactgcagcaggcgcgttgccagcgtaatttcacgctcttcggtcagcaccattggctgcgtcaggctgtttacgttgatgtcagcacgtttgaagattgacgccacgcgggtgtaggcatactgcatatacggcgcagtgttgccttcgaaggccagcatgttgtcccagtcgaagatgtagtcggtggtgcggctcttcgacaggtcagcgtatttaatggcaccgatgcccacggcgttgaccaggctgttcagctcgtcttccggcaggttcgggttcttggcgacgataagctcacgcgcgcggacaatggcttcatccagcagatcggacagcttgatggtaccgcctgaacgggttttgaacggcttgccgtctttgcccagcatcataccgaatgcgtggtgctctagagtcactgaatcaggcacgtaaccggctttacgcacgatagtccaggcctgttgcaggtgctgatgctgacgggagtcgatgtagtaaagcacacggtcggcacccagcgtttcatagcgatattttgcgcaggcgatgtcggtcgtggtgtagagatagccgccatcctttttacggatgatgacgcccatcgggtcgccgtctttgttcttgtactcgtcaagatagacaaccacggcgccttcgctgtctaccgcgaggcctttatcctgcaggtcagagacaatgcccggcagcatgctgttgtacaaactttcacccatcacgtcgtcgcgcgtcagcgttacgttcatgcggtcataggtaatctggttctgcgtcatggtgacgtcaaccagcttgcgccacatctgcaggcagtattcgtcgccgccctgaagtttcactacgtagccacgggcacgcaaggcgaagtcttcgtcttcgtcgtagttcttcttcgcggcgcgatagaactcttcaaggtcggacagtttcatgtcaccggcgctttcgttctgcactttttcgaggtaggcaatcagcataccgaactgcgtgccccagtctccgacgtggttggcgcggataactttatggcccagcagctcattggtccgcgccgcagcatcaccgatgatggtggagcggatatggcccacgtgcatctcttttgctacgttaggagcagaatagtcaatgacgatggtttgcggttcaaccggcgcgatgcccagcttggcgtcggccagcgcggcgtcggcgttggcggcaacaaattcgcgggcaaggaagatgttgataaagcctggaccggcgatttcgattttagaggcgataccggaaaggtctaacagcgccacaactttttctgccagctgtcgtggtggcattgccaattttttagcaacggacatcacgccattggcctgatagtcaccaaactgtgcttttgcagactgacgaacctgtgcttcgctgtctgatggggcacctgcggcaacgagtgcctggcaaattttttctgaaagaagggcctgtatgttcaccggattaccttaatgactaaacgtataacaccgtaaaggtgccatcttgattgactggcatggatgacctttgagcacttgttgtcccattgttcacccctgactttaatgatgcgcatttatatcatattagccaacttgagtcagtaatgagcgctgcattatccccttcatctttcaccggattcgttgaactggcaaccgggcggcgggttgtgtaaattaagcccccggccaccgagagaggaaaaataatgaccacaattaacgccgtgcctgaactggcggatttggtggcagacctgccgcgctttaaccaacttttaaatgcatttgcagaaaaactgtgtctgaatctggccgatttttatgccgatcatatttctgtacgctgtcatcagaacaccaccgccgaccgttggcgtcagggtttttcccaatgtggttcactacttaatgaaacagaaatcaacggacgccctatctgtctgttcgacctgtctacgcctctgagcgtgggaccttgggaaattgacctgattgagctgccgtatccgggcgaaaaacgctatccgcatgaaggatgggagcacgttgagttagtgttgaccggtggtgcggagggtttttatgcccgcgcgctggcgcagctggccgacgaggcgctggtagcaccgggcattaagctcaagcaaagctcgcctaagggcgagcatgagagattgccgaacccgacgctggcgattaccgatggcaccatcaccttaaaattccacccttatactctgcgtgaaattgtcgccagcgagcgtgaagccgagtaaatctaacgggcagccagcgccgcatccatgcggtctaacgctttttcaagcaaagcgcgctggcatccgagattaattctgacaaagttcgcgttaccgaactccctgccgtcagataatccaacgccggccttcaggaagaagcgataaggtgactccagctgcgcctgggaggcgtctatccagccgagataggtgccctcgatcggcagcatctttaggccgggcattgcgttgatgcgctcaaaagccaggtcgcgattggcgcgcagatagtccagctgcgccttaagccagttatcaccgtcttgataagccgccgtcgccgcaacgtaggcgagtatgttgacatgcggaacgataccgtggccggttcgggcaaacttcacccgcagttcacgattgggaatgacagctaacgacgcacccagtcccgctaaattaaaggtcttggacggtgccatcagcgtcacgctgcggttcgctgcatcttcgtttaaagaagcgaatgggatatgacgcagaccgggttcaagaatcaaatcgcagtgaatttcatccgagcagaccaacaggtcatggcggcgggcaaactcctgttgcgccaagagttcttcacgacggtaaacggtgccgcccggattgtaggggttgcacagcaacagcagtttttcgctgccggtcaacgtagattcggcttcgttaaagtcggttatccaacgctggtgatgcactctggcgtgaacgtgacgaaactcgcggccttcggactgcgcggcctgcataaaaggagggtaaataggcgagggcatgatgctggtttgctgcgtcgttgtgaaggcgcgaacggcgaggtttaacccgcagaccaaacccggcagccagactatccattcgggttgaatggtccagtcatagcgctcgcgaaggcgctctaccatcagctcaactaattctttcggcggtgagccataaccaaaaacccttcagcaacacgcttttgcaacgcattgatgaccgcaggcggtgacaaaaaatccgtatcggcgacccacagaggaataacgtcggcgtcgcgatatttgttccacttaacgctatcactgtgactgcggtcgacccattgatcaaaattgaatgtcatagttagctttcctaagcaggcaattgggcaggatgctcatgcatgagcctacgcgacatagccctcacaaacaagtgttgtagcatggggtcatattaaggagagagccatgacgaagttagaagtgtgctgttacagcgtggactgtgcgttaacggccgaggcggccggggccgatcgcgtcgagctttgtgccagtcaggcggacggcggcattacgccgagctacggaactttaaagctcgccagagaaaaggtaggtattcccgttcatcctattgttcgtccgcgcggcggcgattttttctataaccagagtgaatttgatgtattgaaaagtgacatcgcctgcatacgtgatttgggtttccccggcgtggtcgtgggaatgctcgacgcagaagggcatatcgacgttccacgcatgtgggaggtgatggcgctgtgtggtgacatgcaggtgaccttccaccgtgcctttgatatgtgccttaatccgaaggttgcgcttgagcaattgactcagctcggtgtcgcgcgcattctgacttcagggcagcagcaaaatgccgaggtaggtatttcgatgttgcgtgaactaaataacctgacgcgtggtccaatcattatggcaggtgcaggtgtacgtttaaccaatctgcaaaagtttattgatatcggacttaccgagctgcacagctcagcgggacgtcaggtattttccgccatgcgctaccgaaaggcgggtgtgaccatgagttccgacaccgactttgacgagttcagtcgttattgcgtagatggcgatatagtggccgcaatgaaaaatgcgttggaatttgatgattcggtgagtcggacggcataaaacgcccctcggctttcggattaaagcacaaagatttaacgggtctccggacccttttgcgtcgccctgcgcaagtaccaggccccgtcattttggcggggctttttttatttaaatcattgtgttggggttttgagggggttagggatgttacaaaagaatagcgtgagcgggaatgtaccgcgtaaagttatgtagaatattggggccaaaataccccagttaaatcatcacgttgcctggccgcttctcatcgatgcggggaggattctgcctttcatccgctgtttgtcgatgtattctgcaaggtcgattatgtggatcattcgcggagtcttttgtctcacccctatccgaaactggaacagtagcggtttcgaattcagccattatcagccattaatataaatgttgtgttcacgcttatcagcaggggttatcccttccagaactggccattccgtcctgtcgtccatatcaaaatcacggtgttctgtttccagcatgatgagatcagctttttatgacctcggcgtttatatctaacggcaggcggtacttcgagcgaatgacgttatcgagacgctgctggcttagacggtaaataaggacgctcttgaacaatggactattcacgtttaagtctcctgggggattaagcgcgatgttaattctttttatttggtcttattttttttacaatataactcttattaattaggattttgcttgatggtatgcgtctgcatgctaaggtatttacgaccgcaagatcaaaagcttttaatttattttctcatggtatagcatgctttattattaaatatgcttaacatgaaacctatgaggtaaggatagaaaatgaaaagatcacctaataataaaaatcgcaattggaaaaataagttaattactacaagtatttttgccgtgctaatttctggttggtctggctctatatttgccgatgaagcaaaagttaataatagtcattggtcgcaaggagaaaaagagtcctattcagaattctcctgccccactgataacttcatggtcggtcgtgcacatagtggggatgaaaatggtaatactagttataaatgcggaaacttagtgcaaaatgggggaactattactagcaaaaataaacaatggtcatcttcaattaaggagtcagatggaaccgcttatcgttgcccgcaagaaaaagtaatgattggccgtaaacacacaggtgacgaaaatgggactacctcctacgaatgcggaacaccgattaataaaaatggtgaaatcctcagcataattatcggtaattggtccgatgcagttaaagaaagcagtagtaaatttgaatgcccagataattcggtcatgattggtcgcaggcatgcaggggatgaaaacggacgcacggaatatctgtgtggcaaacttgctaattaagtttaagcctcccttttttaactactgtcaggttcttcatagggaattttccctgcccatcgtcaaacattcaagtttgtcgtctggaatagaaccagactctatgctttgctcgtcagtgcatttcatgttctctggcgtgacatcctcagttggcttatgaagacattactcacatcggggtatacttaatcaatgggcaaaagtcgccagtttgttgtgctttttgttagacttttacacaggtatatcacacgatttaatcacttaaaaacagcagaggaactcgtctatgaagagcctctatcaggctaaggcctccactaccgccgtctgcccatacagctatgcgctgcgtgacaatgtcgacgtcgaacgggttctgctctgaggatcacgacatgtcccctttcatcaacttaatgccatcagcctgcgtggccagccctctctatggccgactacgctggcaagctggttctggtggttaataccgccagccattgtgggttcacgcgacaatacgcaggccttgaagcgctctacaggaagtacgcagcccagggcctagtggtactgggtttcccatgcaaccagttcggtaagcaagaacccggcggtgccgacgaaatcgcgcaaacctgttacatcaactacggtgtgagtttcccgatgttcgaaaaagtggaggtcaacggagccgcaacgcacccgctgtttcgttaccttaaggatgaattgcccggcgtgctgggcgggcggataaaatggaacttcactaagtttctgatcggacgcgacggcaaaccgctcaagcgttttgcaccgatctctacccctgaaaaaatggaagccgcaatcattactgcactcgaaagcaaagtgttcctgtaatccgaacctttcatctttaaagagtgttcgacacactgattgtctccgtggggttaacgtctgttcttcgctcacaactgcccatcaacgcctgcctgcctaaaaaaaagcttaaggtgggatgtttgccgttttcaaaacggatcccttaaactacgccgcgcaggtcataacataggagcaatgaccctaaacggctgtagtcttggattgtagactatgagttaaaaacattgccagaatgttcatcagtatctatttataagcgccctcaattcgtttcgcgctgatgcgtcaagcggctccaacgaacgaagaggggcagctgttcatacgaaggaattaagatgcttttgccagatttgagctttacaaaaaccgtatatcaatcgtcatttgaagaatgagccgtccactgtttgtttctcttgatgggcctaagggcgccggcaaaaccacactgttggaagccattacgaaagtactaagggctgacaacaagaaggtcatccgactttgcgagaaaaaaagcgatccctacagaagggaaacaatgctcctggttaaccagcttgccagaaatccttccctggatttggaatgggaggtttgtgcgcgcttagctgatagtcgtgcctggatttctcagcacgtgctgactaaacagccgccggacagcattatcttgatcgatcgttggtacccgtcggatgccgcgtttcgccgaagggtttcctttgccgagattttacggcttaacatcgaacgaaacgtgcaaacgccagatctgcatgtcggggttgtcactgcaccggatatttcctgggcaagggccgcggcccgaaagcgtgggctaagcagtactgtgattcataagctggaagatcatgtcgcttgcacccaggcgttcgagcgagaaattgcagatcgcggctggtttttatgccgtaatgaaggagttatcgaagacgcaacgatgcaggttatttctgagatctacaaagtgatttgatgccgcccaggcatccagcgctgtcgtagccagctcgacctgcttcagggcattttgggtaaatcatcacttttcatcagcattaaattaatactcgatggcttcaatttaaggcgtgaagccatcgaaagtttttactttaataaacacaacctctttacgccttctcaagccacgtcaatgcgccaactaatatcgtctctaatcccgtttgcaatgtcggatgaatttgcgggctgaacttagatgaatggttagaagggatttggttaatgtcgccacttgcaacggctttttgccatgctgatttttctgtgcatcctacaaaccaaaatacatacggaaccttccactctctgccaaagacactaaaatcctcgctggctgctgccggtgcggtttcataggttctttctgcaaaatggtctttgaaagcagctgcaagagtagccgtagcgttgatatcattttctgtgacagggtaactgtcaatcgtggtaaattttggtggatgatcagtatttgaagcctgacattcggcacagcagattctgtgtacagcatcgatcattcgacgacgtacattgtcatcataagttcgcatattcagtttgattactgcatcgtcgggaataatgttctcttttgtaccggcttgcagggcgccgacggtgagcacgccgctttcgagtggagagagctctcgagatacaatcgtttgaagtcgcataaccgtagaggcagcgatgatgaccgggtcaatcgcattttggggcattgaaccatgagctcctcggccatacattttgatgtgcatactgtcgccggctgataaaatcgccccggcgcgatatcccacagttccagcttctccaaccataacgtgttgacccaggatgatatctggtttgggaaaacgttctttcattccatcatcaatcatggcttttgcaccggcaccaatctcttcgcctggctgaaataccaccatcaaagtcccgcgccataagtcacgatgagaggccagaagctctgccgctcccataagccaggttacatggaggtcatggccgcacatgtgagaaatgtctaccgtttcaccatcggcagtcttaccctttttatcactggcgtagggcaggcctgttttctctgccatcggtagagcatccatgtctgctcgtagcataacggtagggccctcaccatttttcagcaagcccacaacacccgtaaccccgacttgctcatgaacttcatatccaaattttttaatcaacgttgccgcaatcttggcagtgcgaacctcttgcattgaaagctcgggattagcatgaaaatctttataaacttcttcaagtgagggcaataatttaatgatgtcattagacattcttgataacacttgatttctaggtaacgtatccatagattctccgattatagtgatgtttcttataaataagttaatttaataagggtgacaagatcgcaattattaaaaaataagcaaaaaaatataaagccaaaaatgtgtgaggttaaaaaagcgttggctgatttttatttcagagtattaagtattggttttaattgccggtagattccatttgtatttaagggatagcattcgaatcagtgtgcaaagtgctattgcaagccatgggcttacacgtggattaatgatatgcacctcaccaaacaactgcaccgccgcaccaagtagagctgcagaggcatatatttctttagttaacaccactggcacccggccaagaaggatatccctaataaggcctccgcctacagctgtaacgatccctaataaaattgccagctcaatattatgaatatgttgataaactttgtgagcaccaaatgcagaaaaaaatcccaaccctacagcatcaaaaaaaagcgtcggttgcgtaaacttgagtaagaaattttgaaacccggcgcataaaattacagcaaaaaaaataacaccaatatattcaatgtttatcaggcccgcaggcggtgttgaaccaatacacaggtcacggataactccacctccgcatgctgtgacaaaagccgcaacaaaaacaccaaatatatcaagctggcggtttattgccgctaatgccccactgatagcaaagacaaatgtacctatcaggtcaattgccaaaaatagatcagcttccaccctttactccttttaaacattctaaattctttcaacaaagcttagcaccgttggagaaagcatgacaattactgagggctctttaacatgaaaaccacacgcaatgatacaactttgttttttttattattaactttcaatgggttaagttatgactgacctggttttgacagtaaattacaagagtgaaatttgggaggccaacttgaaatgcaacattatggtttttagattttttataagatagggatgaaataccaaaggcttatcattcctgatttcttaattttttttgattgtctttgatacatttcaacatcaataccttttcttctgatgatgtgctgagcaggtaaataagcggtgtagattttataaatgaagtccttcatgccttcactcgaaccaacatactcgaacttcgcatattttccgccgctaacattaataatactctcagatttagtgttagcactattttcgcttatcaaacttgcagctgtatatttaattctgtagttaattttatcgccacttgatacataatcgaccaaaccaataataatattgttagtggatttggcggtttttctttcaagcagggattcgcgtattgaaaaatcgaactttgtttcttcttcaactttacatgaaagctcatatccaatacctacaacattaatactttttagatctaaaatttgaggtgtaggcatgagttccctcatattgtgataaggtccacagaatcccctgatatcccaggtgtctgatagcctaaaagcatttggagttttactaaactgggatttaaaagctcgcgaaaatgcctgagtagatgtgaagcaaagttcattagcaatatcgacaattcgtgtctgagttaacattaacaaaaccgcagaccgagataatctgcgcaatttacaatattcacccaaggacaaaccagtatattctttgaagattcgatgaagataccatttagtatatccagatctattggcaagcagatcaagggataacggtttatctagatttccttctatccaaactagcatttcattaaggactctatttcgtaagctctgatctgtattcataatatttacgatgccaattcatatttatttacaagttgatactacatgatgatactgcgtctcgaaagatttttcactttgtttacgggagacgatatgtaatcaattataatttttttcattttaaatattttactcgtattagatgaagtaacccattccctattgctcattaaaccagaatgtgtggtcatctcttcgctcatggcagacggaaaatattcactcctgccagatatgagccaaaagcagacattagaatcattagcgcgttgttataatgagtggcaggtcagcaataaaatgtcataaaacataaagccacccgcaggtggctggattcttactgagacaatattactgtgcagcggcgaccaagtggtcagtttttggaaaatatatcagctttaattacgctatttgacccatttccaatagacccggatgatgtaataacataaaagtcagcattttttgaatctgctttgcgggaaatttcactgtcataaatattccccatattttgtatcacactaatacttcccatgcttttcaaacccgttgattcatctttgctaatttctgctgctgcaaaagatgttgagctgattgtcagtaaagctactgcgactgccacaaaccgtacagatttcatttttgaaaataccacgatgattaactatgattttgtgcaatgattgcgggttgatcataggcctctgtataaaagcaatcaacgattttcctatcgtaaaattaacacttatggctctttctttcattcaagtcgctagtgtggttatttttataaagtattaacccattgaagactattgggttaataaaaattcaaaggagtaaagtcacaggggctggctcgaattttagaacagggtaagcttagtaaattgaatgagttcaaccctgaagtcagtgacaattgaatgtactcaggggagggggaatatcaccctctaagtaaagagcgggtaaaattccatggactatccattttttttggcgtcgatagactccgggggacattttaaaacggcgcttaaaggctctggaaaaggattgaggagagtcaaagcaatactttgcagcaatatcaatcatactattattggttaatcttaattctattgctactctagataaacggcgatagcgcacataggtacccagggtaatttgagttctttctttgaatgccctttgtaaatgccatttagaatatccagatttttccgcgatatcgtcaagtggcaaggggtcttcaagatgacattcaacccaagccacaatatcgcgtattatgttactgttcacttagccctccattagggataaagattttatgatagcgaaataatttaacgaaaatagtcatgctaaagagcaagtgatatagcgcctgctgcttcggaggaaagaggaaagaggaaataagaactgcatatgataatccgataaagatgcaaaatacgcgctttgaggtcgaagatgcaggtttaagccagggaattataaatactgaggccgcgcgccagactggattttcaagctttgatcgtgaagcgataaatagtgctcgaaacacggccgggctagttttactcgaagacaagccggcatttttgataagcaacatcattctattaaacaaatcatgtaaattttaaaaataaattgtatacccttgatggtggcgtcacccggcattttttgtaacttaattgcgtgcaattatgtgtaaatgtaactaagtggtgactcgtgttgactgcaacccaacatacggactgttatgttgcaatattgatacttctaccttttgattttatgcatttctcaccgctgaaatgaggctttgtaggggctgattagtgcctgaggcagggcattacgagcacttatcatctttgcgcttaaccccgatgtgtcgtccaaatacgtcataaatcagcatcattaccttcttttagctctgttttgaactccttgtcactctcgctgagagccacaccatgctcaggtgcccgctgcaaatagcgggattattatcaatcaggagcctggggatgagtataattctgaagcagataatctaaaatctttagcggattacagctgaatgacgtgattttgaggcctgtcttagccaatgcttaggcctcaaaattcaatagttgcgtgttaacagcccgttcgactaaatggttatcagactgcccaatcgccaatattggctttggccatttttataaagcagggcttcattgtccccgaggttttgaatcgttaccttcagcgctattttgccgtcgctaatggtgtgggaaaaggtgcctgtccttgagaagtattgcacgtctttttcaaaggcctgagcaaaggtcacaacctgctgattttcagatgcatcaagtccctgaatagtaatcagtaagcgctctgaaccgagacatttatgtagttgagaggaaagttcattgaccttaaagtcttgcttttgggcgatacccagaaaaccatcaagtccctcaacaaacaaccaataccaatatccgctgtcggtgatgtaggtgctgctgcgaccccgaaaactaccaatcagcgagtgatactgttttttaatctcataactgttttgcatataaaggtcagtttgaagattaaaataggctgccaaagatttaacctcatcagtcagttctagatctccttcattttggaagtcatagtaagaggcaatttctttgtagacgttctcgatccagtcgtcctgtaacggtaatttcgtctcttcatcaatgagttgttcaattatgctgtagccgacgagatgcaatttttcattaagtgtattggggtctatttcaagaatatcagcttttgcctgggttgcagtggaagctcgaggactggtaagaaattctttatatttccgcgtttcatctcgtaaccttatgaggttgtaatctatatcattcctcgaataattatcatatagctgcgagctgtaatcattatagtcttcaaaaacaatgcgttgcttaaacattgctaaagcaatagtggttgctgaagtactcattgtaagatcctctaacattaataaatattataaattatagttaaaggaggtgatttgtcgagttgacaggatcaattattgccgacatcgatccttaccggtgtcaggaaagtgccagccacaggcatgaaaccggtaggtaggttacgccaggcactccttagtgaaatcctttacgtaaatcagactctcgattcggcggccagtacatcgatgataaaatccatcaacaaagtcaggttcgatttttcatctgcacagcctctgctagggagcatgttgatcatgtcggagttctgtcagaaacaggatctttaagtcctttaaccctgccaacatcaatattgaagtcagtgcggtcatgattttcatgagatggctgcgtttgtactgagtaattgccttgttaaggtcacgcgggttatttattgtttctaacaatgttaaggggggattacgttctcggtttgatagatttacggctaaaaaagttaatttatgtgtctaagccaattctaattacctaattttaaacgacgagtgaactgatcagaaagcgaaacggttgccaggtttaagaagtgctttcatttattgcgccgaaatcttatgcaaacagaatgtaaaataatcaattagttagttttcactgttttctttaaaagtaacgttccaatgaggtcacaccttttttgtttcccggtcttgattaaattaagcaatgatttaaaattatccaataatcctgggggcgacaaaaaatgacttggcatagtcactattatcaactgggcgaagttacggttttttattctgttgttagtttgtgaatagtgtttttattttgagtaaatctgtcttaattaatactattaggtgggggttgaaaatggattcaaaaaaaaggaacgttctgtctaagcgttttaaaatagatggaactcttggagagcgactgcttgctctcagaaaaacgcgtaaactgactcagcgagatttagcaaaaatcattagagtttcacacgtgacgatatctcaatgggaaagcggagacagtgagccgagtggaagcaacctcattgctctaagttttgcattagagtgctcaccgactgggcttatgtatggtattgatttcgattctgttgaagccgaggtacaacccaatacgctctgcattcgatatccagtccttacttctttacaggcaagcaggctggaagatccattagatgttaatacgctgaaggacatcaaactgtggttcgaatctgacgcacccttagagggagacggtttctggaccttggtcgataatgattctatgaccgcgccagtgggtatcagtattcctgtcggcacctatgtgctatatgacttcagtagagaagcggtcaacggtgactttgttctcgctaagttaaataaatccgcaagcattacttttaaacagtttgtcacggatggagaacataaatttctaaaggcattaaaccctgcctggccgctgatccaaattgatgacggctgcgaaattattggcgttgccgttgagacgaaattacggttcgttaaaaataatgattgaataaagcactctatttatagctcattaaagtgaagagtcttttttatcttagcccattaaataatgggctagagagagcagggttcgtaatagaatgcatgttaaaaatcgtcagaagttcgagcgactacaatctctaatgcatttcggtaaatatcttttcggacttcatcatcttcaacttcaagctgttcaagtaaaagcaaaattatcgctttgttagtgactgcgccttttttttggtaaattgaataatacgcatcagaaattatctcttgctcactggttgatgtaaattccgtactttccaggtattgaagaagttcaaattcactaccgatattattcagcatgttttcaccatgaagtcattaaattgaaaatagtttctgcttaacagaaaaaatccctgaagagagatgaaatcctttgttcccttcaggggcggtgcaaggcaccttcgttacgtttgtgactagaaggacacactaaacttatacaacatatctatctttgtacaactttaggtgtagcaaaaagtgctattttttttaggtaaagctaccattttaaatggcattaaagatcaatcaattgcatgattttgttagaaaaacctaacatgaaaagtagggtctgcaattttatattgttgtgaaagtgagcaccgcctgagctgtaaagaggttgagcatttcagggttagtttaaatcagcgcagaggctgcctgcattttaaagcgagccaggggttttgacacaaaagcaggatcttgatgccgtggtctttaattattaaaaaccttggcttttaatgaatagattaattttaacttcttaagaattttgttatttttatttaaaattcgggcttttgtcacacctgtcttaaatacagtttgattatttattgcatatctaatagtgataatgtcatttattatgcattcttcgcttttagttgctacctccaaccctcactcggaacatgtcatgcttacaaccctcatctatcgaagccattttaatagcagtgtgaccttttcatcgatgtttaatatggttgcacaggcgaacgaccacaacagtagtgtgggtgttaccgggatccttctgttcgatggaacacattttttccagctgctggaagggcctgaggatgcagtgttgcaggtctacaaaaaaatctcccaggataagcggcatgataatcttgtcgaactgatgcaagatttttccccaggcagaaaattcggcaatgtgggtatggaactctttgatcttcgccaacatgatgaagagtcagttcttcaggcggtacttgaaagaggaacctcaccttataaactgacgtacgacgatcgcgctttacagtttatgtgcactttcgttgaggggcgtgaaaaggaaaattatcttgaaataccttctaaagatcactggcgttttgtcgccgataattctaatgctgcctctctaagcgatagcgatattaatgtcacggagtacagttttgcgtttcagccgattatagatccactatctcaacatatcctgtcctatgcggccgaaatgcgcactgtgaatggcggctcggcatcgtcatatttttctgcaatatcagatgaagaaatgtatcaggtagaccttaggtctaaggcgattgcttttcggcaggctagcaggttaggactgggtgaaaaaacgcttaccgttaaactcctgccaatgtcgcttatcgccatgcctgatgcggtggaatttcttcttaatgaaattgcgttaagtggcttggttgcggaacaagtagtcatcgccatcaccgaaaatggttttatcagccgagatgaggcgtttattaaggctatcaggcgtcttaagcagtcgggaatgcgtttagcgattgatgattttggggcagggttaggcggtttactggttttaacacgattccagcctgagaaaatcacgattgataaagatatagtgagtgatgttcatcgccaggggcctaagcaagccattgttcaagcaataataaaattctgcacttccttagagatttctgttatcgcttcgggcgttgagaaaacggaagaatggatgtggcttgaggccgctggcgttaataattttcaggggcatctcttctctgaaccccagcttaatcgttttcccactatccgctggcctgaaatgaacgatgggtaaaataacccgtcaacctgtgaacagttatttatcatgaccatcgtttgaagatgtccgctgcattggtgcagcggacacacagtagaacttgtcgtcacgtgttacatcgacaacccattctaaagcgtttcgcagcatctcctgctgccgggtatttcctgcttgttcgatctgcatgacgagtcgcagaataatatctttatgcgttatagagccacgtgccgcgataagatcccgaacaattgcgccgatcgcttgtcgttcactgacgtatttatcactatcgggtgtgactttttcaacaatatttccaccatcactggagttcttcgagctttcatgtccgtggggtctaaatgagtctgcattcaacatcacagcagaagcctctgattcagtgtttctttttcccatcggtttgcccttcaacggtaaagtggtggagaacgttttttgtgtctcgaacgtcataattgcggtaactcgtttgttgagtcgaggaacggctatgccttatttccacaatgtttcgttcgcaggcttgcttgatgatttcgctgtcagaactgtccgcaatttcttgtagttgtttaatcagttcagccactgttacgggtttacctgacctcagaagcctgaggacagcgtcgccaataagagagtcattcaatcgttcatcggtaatttgttgcatagtcactgctctgggtaaattgtccttattgattaaagtctacgcatgagggcaagaagcctgtcaatgcattaacgacactcgacaccttagccattgcgctcaagtaccaggtggagaagcttctggtagtgtctttcttcttctgcactggcggcaaactcaatacgttgcaatagtttagaacatagtgctttacggttcagattttttcctgcctccaacaattcgaccacgattcttcccatggtgatgtcttcagagagtttttgcgggtttggcagggttgaaatcggtgtagacgtcaaaacgccttgagcatcagtacgcatgatgtttctccatctattgattgattaatgatctcatctagtttttaaaacttatacaacaatagggtttgtgtacaggtttgtttgcttaaaaatcatcatacagtaaatggagaaaccgctatttctctttatttaactgaatttaaagggttatgttggtttggcgtcgtcatctttaccgcgcaatcttagaaccatatttcagactgtacgccgaagctccagttgcccccggaagtaaagccagcactgccaaagtcgtcattgaccgcgtatttatctaaatctttgctccagttcatgtaggtcacgaagaaacgaatctcaggacgagccttgatatcaaatacgtcaccgaccttgaaggtcggggcgaaggtcaacttgtaaaagtcacccttaaccgattgataagcatactttacgctgtcgttaagataagtccgtccgttggggtcgaggtccatgtattgccatgaagcctcatagagcagggcaaagttttgcgtgatggcctgagaagcgcgcaggttaaaagtagcccagtcatagcggtcaccgtttcgataacggtcctgactatgctgtgctatcacggaaggcgccagttcccaatttttggaaactgggacaatcccgtaagaggccaagcgcaccgacctcgcatctctcgtcaggtcgccgtcgctgccgggctgtcgtgtctcggcccccaatccacgaccgaattgaagtgcgctttcggatacgccgggaagcagaccgtagaaccgatttttgtcatgataggccagcatcgcatagtatccgcgctgcgcggtgttatcgctgcgcattgcatagctgcctgtgctggaggtttggtcttttagttcatcattgccctgagccaccatgccagtgagcatgagctgccagttgtcgtaaaagctgttggcagtgaggagaacgttctgtacgtcattatcgttatagcgatcgctgcccaaatcaccgaaatttcgcgcataaattgagaagtcatttttgaaatgcggcgtccattgcacgtcattaattcctccgccggtgccgccgagaaacatgatgtcgctgtcggtgaagtgaatatcgaaattgtcgcggtcgaaacgcttacccgcccataaggtggcattctttacggggccgctaaagcttggtaaatcggtcatctccacaaaaacttggcgcacgtttacatggtggctgtcattatcctccacccagggatcggggttactggctccgtcggcaagctgtgctttaaagcgcgctttcgagccatcatcaaagcgtaaatgcttgataaaacctaactcgacgtagttgtctttttcattccccaggcgaccaacgtgtgcatctccaccgattgaactggctggtgaaacgcctggcccaccgtgtgcaccgtggccgttgccattaatcaacatcccggaacgtgcataaccgccaaactcaaagccattgtccccggggacgacgctgaagaggcgagcgccgtggcgtcgacctttttctctgtttgcaccgtcttttgctccaccgacgtggtgcgattctctagctgctggacgcggttttctgctatccgtgcacgttcatctgcatctcgaacctgttgctctgctcgcgtggcacgaattttggcctgttcggcctcgttttccgctctgtttaatcgctgctccagcagcgtcaggcgctgttcaatcgttaaggtattttttgcagccaagcttattgctggagataccatgccaataaaaaggcatgacatccctgcgtaaatattatttaaacgcatagggagcctttattatttggttttttattaagctacaatattaagttaaacggtattaatgggatttttcatcggtggtggggtgaagtgctcattcgcagaacattttctttcatccagttcgcgttttatttcctcataagtatcatcgagacgataataacgccccatccatatcatggataataaaataagtgccgccgggatgtacaaataacaggccttgattgccagcagtgcctgaggattctgtgcctgattcgccacatatcctccggtagacagcagtataccgcttattgccccgcacccgccatagagacttttcccagaaatccgttaacggaggtcaaaattcccgcagtattgatccccgttttccattcaccataatccaccggatcggcctgcatggaaaaatagatagccgtgcgctgaccggcacccatcgataatattattgcaccggttaacaagcctaaaatatgggtgccggaaactatcattatcagcatgcctgcaagattaacggtactggcgaacaaatagacctgacgctttttcattcttgctgccataaacgggacggttaatgtgcccagtaatgggacgaaggtcgatattcccgcagctattgccgtaatggtggtattacaaacataataattaaagaaatagaccagtgcgcctgtctggaaaaagaatgcaccccacatcagaaagatattaaccgcgaatacaaaccaggggcgattatgacgcaaactggtccacgcccgacgcaaggtcattttttcactctgctggttgatagcctcttttacattagcgaaactcagcaggaggaagaaaatggcaatactgccaaaaattagcgcggtataaagaaaccctgtttgctgattgccatggcccaatgaatgtaccaacggaagtgtggcaacggccacgaccgtcgaccctaccgagcccatcactatcctgactgccgaaagcgtggtgcgctccctcgagtcattggtaataaaaggcagcatggcgcagaagggaatattcaccagcgtatagaggaatgataaacagagataggtgagaaaggcgtaccacagcttgcctgccagcccaaagtccggcacgtaaaaggccatcatgcacaacaggccgaaaggcaccgcgccaataagtagataagggcggcagcgaccccatcttgtgtgcgtattatcaatgaccagccccatcagcacgtcggcgacgccatcaaccaggcgggtgactaaaaacattaagccagcgtaataggcgggtaggcccattatgtcggtataaaaaaacatcagatagagcgatattaactgccacaccaggttacaggacagatcggcaacgccgtaccccaggcgctgccgccatagggaataagttgtattttgcattatgttttctctgtagggtaaagcgttatagttatttaaagttggtatttacgaataaaataagccggggtacagctccaggcgtggcaatagctgtttattaatttgctgccatagggtgagaattcagggtgacttgggtcataaagttcccaaaaagtatcggctccgtttttgaccatgctgccccaatatttttttatttcctctatggcacactctttctgcccgacgctgagtaatgcatcaataaagtggtgcatcatgtaagggtattcatttttatttcaggcggttcagcgagtaatcgacgcatcaggctggcgcgaaatagcgcatccccgacgcctgccagcactagccaaacctgcgaggcgtaggatatttgcagttgtgatccgctagtgaaaaatcctttttcctcattccacagttctttcatcgccgcctttttcaggcgggttatttcggatacgattatttgctgtgattgtttatccgccactctttctgccagcttgagcgctttctcaaggcaataaataaacactccctgtgaaggagcctgtttgttgagtgattcatgccagtcaataaatgcccaccagtcttcactgtctcgaacaatgccattagatcctatacgttcaagcgccaattcaatctgtcgccatgcggttggccataattcatgcaacgtctgaaggtcgtgggtgacatcaatataatcttcgagagtcgcgacaaaaaacagcgagtaatctaataaaaaagtgtcgtcagcaataatgtccggcttcataaacaggttggccgaaacaaggccgtcctctcttgtgacggcggcgaataaatacaggcaccttttcactaaatcattttgcccgaaggtttgatagttaaccaaagcctgtaatcttaagtcgccaagccaaaggcgtcggtcgcgtttaggaccgtcttcaaagacttcctgcatacagtttttcagcgttaacaggctgactctgtctattttctcgagcagaggacagcttgaatgcattaacattgccggttcgctactggcggacgtcacggtattgaggtgtaaatctcttaaccgcaggctgaattttggcgaggtcgagataacctgtattttgacgtaccggcagcaataacggcgcggcaggcgaacctctgcgggtaatacatccaggtaaagatcttcctgttgcagccaactgctgctcaaccagcctgtgtagttttcaaaggactctgcgacttcgacaggggtttcaccaaaggtgaatttaagatgggcgggcgcatcgggcggactgcctacggcttcacatctcagcccgaaataacccacgcagtgggtgccaaaatcaacgatgatttcctcacccggccccagcagcctttgtcccaggctggtggctggcgctagcggcagggttttccagccaagaggtaggttcgcgtcgcaaactgtctcaaccacattgagcggttcgacacagcggtactgcaaagtcggtaggaggccagtggccgttgaaagaaaagcgttattacgtgtaaaccttaattcgatatttttttgcattccctgagacatgctgatttcctgattgttaatggtccgcaaatcagtctctgtgagtcaagccgaggtcgctattccgagattgccaccgatgaacagaaattggcagccacagtgtgattacgtctgagccgatcacaatttttgaaaacatattcgcggcttgccgaacattactttacgttagctacctaatagataatcaaatgtgtgagacgtttcgaaccatggaaagactgaaagtcgaagactttttcccctcctttacagaaaagctgtcggtttattcgagcgatcccgaggacaataataaagaacactgccacgattttaatgagctggtgattgttgacagtggccacgggttgcacgtgattaatgaccagcctgttttcattcaggaaggggacgtctttcttatccgacagaacgattaccatttttatgaagagctagggacgctaaaactcactaacgtattgattaatccacacagtgaattcaaattcttgcgggatactgacagccttctggcaggccttgctgcgagtgaatgttctcgttacggttggttgttgccggaggtgaaagaggagtgtagcaagttggtcagccagatgtttaacgcaggaggtaatgatgacaagcatctgcgttcactgaagcaggaagggctgttctttcagctgatcatgagtttactgagtcaccccaaaaccaattatcgccataacacccagtacaaacttcactgcttgttggcccacttgcaggagcattgtctggatgaaattgactgggcggcaatcgcggatgaatttctcctcacccaaagaacgctgttccgccatatcaagcagaccacgggcatgacacctgaaaattacctcaagcgtttgcgactcgtctctgccagagcaaagcttaaaaataccgaagactcgattacagatgtcgcttttacgtgcggtttttcgaacagtaatcacttcacaacgacctataagcaggccttcggcttaacgcctacgcaggagcgaagaagagtctcagggtaatgttttccctaccactggagagtgtggcccgagtaatcaacgtaatggtggccgccttttccgctccaggcttcgatctgttcaacaataccctgggtgctttgctctatcgttaaggtggcattttgccccccatatcggtttgtacccaaccaggatgcaccgagagcagggtacaattttgcgtttttgccgtatccaacaaccctcgcgttaacatattgagtgcagccttactggctgcgtataaaggatacgtcgccgaaccgttctcgtttaagctggctaattgtgaagtcatcagcgccattaccccggtttgggattttatcagcggcaaaagttctgcggcgcagcgcaccggagaaaaggcgttggtcataaagagagccatcaagtcttcatcgcttgattgactaatgtcctgatgggcggggccgtagactccggcattgataaaaatcaggtcgaacttgtgcgccgaaagctggctttttagagcctgtctttggtctttgtgattaatatcaacggtaagccactgaacgtcagaaggactttttgatggaatttcccctctacaggttgccgcaacctgccagccacgagcagaaagctgttgaaccaggcctaaacctattccccgtgaggcgccgataatcagagctgaaggtgtagatgtcatcatttttccttatagtcagggcgagagacgttgtgtggagggcatttacatgccagcacaatgtcgaagaagttataaccgcataatattcatatcaatgcttgagctgctttgggccgttttctgtgcttttttaaaagcgataattgacacccacgctgaactgcgtctgacgacgagaactttcgtcatccactgattcattcatcgcttcaacatagggcgtgagatggcgggtcgcctgatagccaattttaactttatattcatagtcatgaggctggttgttataaaggtctacattgctgtgataatagaccaaagcataggctagcgtgaaatcgccgaatttctgagcaatcttgccctcatacttgttggtaagtttagtcgacttgttaccccggtggattatctctcggcggtattgcgccgaaagcctggtgtgttcaaagagggagtacttcagttttagcgagggtttgtacttatctttattctcttctttcgcccattccatgcccggcacgactttcagacggtctgtgacatgaaaagtgtcgtcggttttaaactccttctcatcgagtctggcatgggtaaaggcctttcccgaactgccatctgcttgttcttgcgggtgaaactttgccttggcacctatgcctatccccgactcaaaatcatgttctatttcaaattcatccgtgtgctgatgcgtgacgtcttcatatttatgaacgtagtccagttccagagcgtgcgcgttgtcagtcaatccaaacagtaaagctgaaaaaataaaaacccttttcatccgtgatttcctatcctgaaaacaaaagtgagcaaagtaatcacatcagatgaatttttaatgacgggaaaacttattttttatgatttaacgttttctttgcagtgcgttcataacaattcgcttacgggaaactgacataagttacaagatgtaagtgagcgtaaataaaaatccaattttcataaagtcaccgagcgagacaacgtcactggcagtgcgcaaaaattgttgtcgcccgtgagagctgagtctgactatctgagtgggaagcaaatcaaacagcggggaagggggcgcgggaggcacatcgtatgtggcaaacgtcgttaccgccatcctggcaacaacgaaatcaggcagcgttgtgcgtgaacaacgctgcctgtaagagggagtttaaagctaactcgcaggataacgctgggctaccaggcgacgcggtttttttcaacgcttaattgcttataacgctgatagataatgtatgagcgaagggtgaagaacccgacgacactgcctgaagaaacagccagcagcataatcagtgcagcgctgaggtgatgagtcgaggacgttgcctggctatagccaatataataacgaagagggaagtatattaagaagatgataataattgaataggtgcctggcacagtgatagtgccttctttgcgcccgagacgataaactcgcggtccaaagattttattagcaacgatcccccaatcacgcatccaataacccacgttaaacttgaagctaaaatatcgccttgctgtagcaaagaaacgaaagaaaaaatcataaagcagagtggtataagtaataaaagtttaatactgacgactttttcaaaacaaaacgttaagcaataacctgtgacgacggctaaaagtacaaatacccacgtaggtgttcctgttacaatttctaacataataattcccatatcaaagatgctgtttatcatcaattacagtgtagaaattcttatcgctaagggtgtttactgctgggtcttgaataatgtgaagttaccataatccagtaaagcttatatattttatcctatcttagtgacatttaaactacaagcctgcctctcccaatccagacttagaggttgcgaaaaaaccgctatctttgtgtgccggaggggtaaaaaagccatcacacttcgattttatctctgtaataaataattctttttaggaacataatggtctcgcaaggcattgtcattatgcttcgtagggtaaagtcattgctaaaacttatgacgcaagcgcgtcgggcaatccttagtacaatgtgaataaaaatcaaatgtatatctattatttgtctgtgcgcaagctgtcataaataacgggaatggcgccaggggagtgagtttttctatgcaaaaaatgcagttttggtcaaaaggaaattcaataaaaatactgataatcccagccgtggcgcggcccgtggcgcattttctcttattcgttaaaggcatttccccgtattgtctaaccctgctcgcgagtgtctaaatgcaactcattttcatcatggctccctcaaaaaaataaattaatttgtcagcataattatggttgtgatagaaactctaatatgtttaatattaatgaattgttgatttctatttaacctaccgatgtgccaagcgttgaagaagcgatttgggagtgatagttacatcaattttcgagaaattaaaaacatatggatattgcaattatcggcgtttcctgtcagttccctgatgccaaaaattacatcgaattttggggcaatatcgttaatcaccgtaattcggtcactaaagttgccgccgttgataaagaaacggcatcgctgagtcgagagtcattacagtggcctgatgccagtgaaaatcgatgggcggccttggttaataccgtggacggttttgataaccaattttttggcattattcccaaagtcgctgaaacaatggatccgcagcagaggattatgctggaacttacgtggtcctgtttggaagatgccgggataatgccgtcgaccctgcgcggcaataaagtcggcgttattattggtgtgttcaataacgattataaagaactccaggaaaatgctaataatccagtcgaggcgcatcattcgacaggaactgcgacctccataattgccaaccgtatttcacatttctttgattttcatggtcctagcattgctattgataccgcctgttcaagttcgctaaatgcgatgcacgcggctattcaggcaataaaccaaggcgactgtgaaatggccattagcggtggggttaatctcattttgacctcaacccggcatcagtcttttgccaaaatgggcatgttatcgcctaccggtgcctgccactcgtttgatagcaacgccgatggttatgtccgtggggaaggggccggcgttttattattgaagccactggaaaaggccttggccgacggcgatgtcattcacggcgtggtgaaaggcagtgcaatcaaccactgcggaacgtcgtatacgttaacgtatcccagcgccgacgcgcaggccgaagttattgtggccgccaatacgcaagccggcgtaccggtcaactccattggtctggttgaagcgcatgggacaggcacacctaagggcgatccgattgaatttgaaggtcttacccaggcatttaacgcactggcgcagcagcagggcgtgacgttggatgacgctttttgcggcttaacctcggtcaaaagcaacattggtcacctcgaagcggcggccggtgtcgcgggcgttattaagattttgcaggcctttaagcaccgcaagctgcccccgctgagaaattttaccaccctaaatccgcgtatcgatgccgcttcaacgccgttctatttcgttgaacaagaaaaagactggcaacgcatcgacgccgctacgccgcgccgcgcaggcgtaagctcatttggctttggcggaaccaacgctcacgttgtgttggaggaagcgccagaacctgtgcgccgcaggccagcaaagggcaaatctgcctcgcgcaacgggtattttattgcgctttctgccaaaagcccggcggcgctgttacagcgtcaaaaagatttgatccaatggctgcgcgaaaatcctaaagcctcgctcggtgatgtgagcgcgacactgttaacccgtcgcgaacattttgcttatcgttatggctgcgtgggtcgagatattcatcatattatcaatgagttggaaaaatccgtcgccgaggggccgctaagtctggaacaccctgctgcggcggatcaggcacaaaaagccgcagccgaagctgccgttctatttgaggctatcagtaccacggacgcctctgcggtaaccccgctgttgctcaagatgagtgaatgctatgcccgtggcgcgacgttggattggtcgccgctattcaagggtgctgacccgcagtgtgttgcgctgccgacctatccgtttgttcacgcacctttctggataaccccgagggataatgcagccagtccgcaacctgcactgcgtgcccagccgcagcgggtcgtaaacgtcggcagttcgcgttataagaccgtgctgcaaagcgatgaattttttattgccgatcaccagattgacggtcaggcgatactgccgggcgtgatgtctctggaatgggttcgcgcggccttcgccgatgcgctgactctcgccgatgccagcgcattaaccttctctcaggtgacctggttgcgaccctttacctgtcagggtaaggcggcggatatcattatccagctcgacccacacccgtcggaggagcagcggttattccagctcctcggcagcgatgacaaaatttactgccacggcacggtgggtctttcctcagaggcgaggcccgcagtgccggtggcgacgatggctgacgacgcccgcacgcttgatgaaacggcttgctatcagcggctcgaaagtttgcagatgtgctatggcgcaggcatgaggtcgataagccatctgacgtttgatgagcatgccggcgtcgccaatttgacgctgcctgccgcacagcctgccgactttatcattcatccttcgatggcagacggtgccgtgcaggccgccgtggtttgggtgagtgaaaagctgcgcagcgggcaacaggcgactgagcaggggcctttagtcattcctttctcactggaagcactggcgttgttgcagccttgcagcgcagcgatgacggcgaccgttacgctggcaggcgagacgacgctgcgtgacgaggtgatcaaagtggatattcacctgacagaagcccacaaccctgaaaataccgctttgatattcaaaggtttatgcctgcgcgtgctcaatgacggtctggccgctaaagaaccgacgaaaaccgtgcagcggtcaaacgttcccccgcagggagcccacctttatcagcctcactgggttgaaaaagcgctgccagaggccgatgcatccgtcgagcaaattgtgctggtaggcagcgagcaggacgttgagcggtttgccaggcttatcgcgcagtcgcaggcggcgacgcgcatccagcggatcctgtttgccgccgcgccccagatcaacgctgacccacaaactgcgcgcgttcgtccgggcaacagcgacgatttcgttgccgccgtggacgcactgctggcacagggtgccaccttcaggcaggtgctttgggtgagtgcggagctggccaatgacgatttcgcgcttcgcctcagtaccggtccttacagcctctttgccctgacccaggcgctgatgcgcaaggtcaagaaagtgaattttgtgcatttccaccaggccgacgcgagcctgccagacgtcgctgccatcagcggtttttaccgtaccctgcgcgtcgaaaagcccgattatatcggccgcgtggttcactgcgacaatgacttcaatcttcacccgctgccggcgcttatctaccgtgaattcgccgatgtctcgaaagatgccgacgtgcgctatgtcaagggaacgcgtcaggtgcgccgatttgtggcggctgcgaacgccgccgggctcaacctttcaggctcagcgcctgcggctttgcgtccgcagggtatttacctcatcaccggcggaatggggcgttggggctaatttttgcccgcttcctctgttcaacctacggcgcaacggtttacctgagcggtcgttctgcactggatgaatctcgtcagcagcagcttgatgcgctaagtgaactgggcggtaaggcgctgtatgtcgcgtgtgacattggcgatgccgccagcgtgcaggcgttgttagaaactattcgtgcagctggccatcgcctgaacgggattttccattccgctggcgtcatcgaagataactttattctgcgcaagagccgcgaggcctttgagcgggtcgtcaccccgaagaccctcgggacttggttgctggatcaggcgacgcgcgacctgccgcttgacttcttcgtgctgttctcctcggttaccggcgtactgggtaatatggggcagtgcgattatgcctttggcaatgcgttcgaagatgatttctcccgcgagcgtaacgcgcggcagcagcgcggcgagcgtagcggcaaggcgctttcgctaaactggccgtactggaaagacggcggcatgcgtcttaccgacaaagaagaaggcttcctcaagaaccaattcgggattgtcccctgctgaccgacgacggtattgccgtctttaactatgcgttgcaaagcggggcgtcacagatggtggtgatgccgggagaggccgcccgcatcaacgaggttctgggcgttgtcgatattaccccgccagaagaggctgtgcgctcagacagcggccagtcgcagcaggacattgtgattcgctatttgtccgagctgttcgccagaaagttacagatcccggcgcattttgaacgccatggtttcttccgtgattacggcttcgattcggtggtggtgattgagctggtcaacgagctgaagaagacgttcggcagcagcttgccgatgacgttgttcttcgaacatcagaccatggaggaactgagccgcttcctgctggaaaactatgatgaggtttgtcgcgggctggtgggcgcacctttagcgtcttctcggttataccggctcagcgtgccgcaacgcctgccgttgatttcgtgcgcgaagtttctcccggccagtcgggtgtgcagaataacgatgacgatatcgcgattgttggtatcgccggacgttatcctgaagccgatagccttgaacagttctggaataatttggcgcaagggcgtgactgcgtcatcgaggtgcctgccgagcgctggaacgcgcgttggtataaagaaggggccgcaacgcctgggaaaagctacagccgctggggaggattcctttccggcgttgaacgtttcgatccacgttatttcaatatttcgccgaaagagacggaaatcatggatcccaacgagtggctgttcctcgagacggtcactcacgcgattgaagacgccggctacacggcagacaaattgaccccctcaacggccggacgtgaaaatcgcgtcggcgtgtatgttggcatgatgtggggagactatcagctccacgcccacgccagccctgaggaccaatggacaacctcccattcatcctattggtcggtcgccaaccgcgtttcgcatttctttaacttctcaggcccgagcatggcactggacaccgcctgttcatcgtccctgacggcgattcacgttgcctgtaacgccattcgtagcggcgatgtgccggtcgctatcgccggtggcgtcaatctgtcgctgcatccttacaaataccacctgttatcgaatatgcacttcctctcctcggacggtcgctgccgcagctttggcgagggcggaaccggctacgtaccgggagagggcgtgggtgccgtggtgctgaagccgctttcacaggcgcgaagggacggtgaccatatctatggcattattcgcggcacctcggtcaaccacggaggaaaaacgtcaggctttaccgtgcccaacgccaagcgtcaggctgacctcattgtggatgcgctgaccaccgccaaggttaatccgcgtcacattagctacgttgaggcgcacgggaccggcaccaaactcggcgacccgatcgaaatcagcggcttgaacaaggctttctcgattgccggtgacagcaccaaatactgtgccatcggctcggtgaaagccaatatcggtcatctggaggcagcggcgggcatgtcggccctgaccaaagtgctgctgcaaatgaaacaccaaacgctggtgccgtccatccagtcgaaggccgtgaacccgtttattgacttccagagcggaccgttccgcattcagcaatcgctggagccgtggccgcgtccggttcttgccgtgaccgagtccagcggctcgacggtgaccaaagaaaattcctcgcatcgcgggcatcagttcgttcggcgcgggcgggagcaacgcgcacctgatagtcgaggagtacattgagccgaaggccgatcctgccgacgagggaaaacctgcgttaatcgtgctttctgcccgtcgtgaaacggcgctgcgtaccatggccgaacagctggcagactttatggcacagcacgccgacctctcgttgcaggacattgcttacaccctacaggtcgggcgcgtggcgcacgaataccgcgtggccttggtcgcggaagttgccgccgatgccgttaacctgctgcgggcttatgccagacagcagctttccggaatcatgaccggccatcgcgacaatgcccgtcaggcgacggacacgcctccgctggccgaatggatcacgctcggccgcctcggcgcgctgggcgaagcctgggccaatggacacggggttgactgggctcagctgcatgcggcacagctgcgccgccgcgtttcattgccgggctatgcgtttcagcgtcaggactgctgggcaccgaccttgcccgccgaacgtactgattcgtttttgccgggtgccgccgcgctgcacccgctgatcgacagcaatgtctccacgctggcctcgcaggcgtttcgcaaatcattacgcgccagcgagtttttattgaacgatcaccgtcttggcgataatcgaattctgcccgctgcggcctttatcgagatggcattgagcgccagcgagcttgccctgctggggaatgcgctgccgcaggccggtgctaaacctgtgctgtcgcgagtccatgacctgacatggcgtcagcctattctggtgagcggcgacgcgctggagattgagattgcgctgactccgtcgcagggcggtctcgattttgacatctaccgccacaagggtgagaagcgtcatgtcttcggcagcggtcgcctgtgtgaagagaccgcgccatcaccaaaaccggtcgaactgcaacgcctgctcacgcgcggtcagctttacgagcgtgacgatattgaggcggcttttaaacagcgtggctttagcttcggtccggcgtttcaggtgattgaacgcttgtatacgcaggccgatgaggcactctcggagttgaaattccctgactatctgcaaatcactccgctggttcagccctttattctgcctccgtcactgctcgacggcgcattccgcaccgcgctcggcatcggtggtcttgacgctggcgtgaaaacgctcgaagtcccggtcgcgttggcgggcttgcaggtttgcaaaccggtggcgggtatccgctacgcctatgcccgtcgtaacgtcgagcctggcgcggcggcgatgaccgcgagctacgatatctgtctgctggacagcgtcggtgacgtggtggtcagcatcacccggctacaaactcaggcggtgcctcagttaggcatgaaagtgagcgccgtggcgcagagtgccaaacctgcggctcagtttaccgccagcccggtctctgcccaacctctcgcaatatcttcacgcgaggcgttgattaacacgctgattagccacgttattgatgtcaccaggctggacgcgggcgacgtcagcgctaccgcgccgctcgcggaatatggtcttgattcgatgatgatcctggccctaaacgagcggttgtcgagcgcctttgaaaacctctctcagacgctgttctacgagtatcaagacctcgcatcgctggccgattatttgcttgaacaacacccgcaatatgacgcgcctttaacggagacagcctcgctgccgagcaacgttaatgccccagtcagccgttcggtgcgtgacggcgtgctggattacttgattgctggcgtgattgcggtgacccgactcgacgaggacgaggtacaaccggccaccgaactggcgaattacggcctcgactcaatgatgattttagccctcaacgagaagctggcagccacttttggcgaggtgtcgcaaaccctgttctacgaatatcaggatatcgactcgttggcagatttcctctgcgagagctatccgcggcaggccgcagccttgcagccagcgacggttgaggtgattgcaacgccaccgttgctgccagatagcggccaagctgctaccaatatggcggatgcgcaagaggtgtcggcaatcagcgataggctgttcgacagtctggtaaccgctatcggtgcggcagcggcaaactgctctgcgctgatgccgctgcatcaatggccgctggataccgtcagccagatgcgtttgcagcacgagctggacgcccgtttcaatggcgtcaatgcccgttcggtcttcctttataacaccctggtcgagtgggccatggcccttcaggcaacgcaggcacctgcggtgatggcgcagcacccacagccgccggtgcagccaacgttggcgagcctgcttaacgggtcacgtctcgatgccggtcagcgccgtccctgggggcgtcgaatgcggaaaatacgcagcacgatatcgccgttatcgggctaagcggccgttatcctggtgccaaaaacgttgaagagttttgggccaatctgaccgcgggcgtagacagcgtcaccgaaatcccgctgtcccgctgggactaccgcaaacattattccccgcagcgtgggcctaaagacaaggtttacagcaagtggggcggttttatcgatgatatcgagcagttcgacagccagtattttaatatttccccgcgcgaagcggagctgctcgaccctcaggaacgcctgtttttacagaccgcctgggagtgcgtgtctgacgcgagctattcgcgccactcgctgagccagtcgcgggtcggggtgtatgtcggtgtgatgtggggtcagtatcagtttattgaaaccaccgccgagcagtatcaaaccggcttcccgatgtcgttgcactcctcggtggcgaaccgggtgtcattctatttcaatctgaatggcccgagcgttgcgctcgacaccatgtgttcgtcgtcactcaccgcactgcacatggcctgtcaggctattcagagcggcgactgcaagatggctatcgccggtggcgtcaatcttattgtgcacccgatgaaatactatcaactcgggcagagccagttcctgtcgagcgacggtcgctgccgcgcctttggtgaaggcggcgacggctatgtgccgggcgagggaatgggcgcggtgctgcttaaacccctgcaacaagccctcgctgacggtgaccaaatctatggcgttatcaaggcgaccgcgattaatcacggcggcaaaaccagcggctttacggtgccgaatcaagcggcgcagagcaacgttatcagcaacgccttcgagcgcgcgggctgggagcctgcctcggtcgattacatcgaggcgcacggcaccggcaccatgcttggcgatcctatcgagatttccggcctgtccaaagccttcgcacgcatcaacaccgaaaagggtattcagggctttccgacgccgggtcactgccgcatcgggtcggtgaaaagcaacatcggccatcttgagtctgcggcaggcattgccggactgaccaagattctgctgcaaatgcgccatcgccagtttgtgccgtcactgcattcacagacgctaaacagccgaatcaactttgagacctcaaccttccgcgtggtgcaatcgcttgaagactgggcctctgcaccgggtactccccgtcgtgcgggcctgagtgcctttggcgcgggaggttcgaacgcctcggtcttaatagaagaagcgccgacgttatccgcaaacgcgttacctaccggcgaatcctacctgtgggttctctcggcggacagcgaaacgcgtttgtcgcgctacgtggaacatatgattgtcttcctcgacaaggcggtgaatacccctgagacggcaccgagtctggcctctctggcgttctcctcgttaatcggccgtgaggcgatgaccgaacgtcttgcggtggtggcaagcagtctgggcgatctgctcggcaagcttgagcaataccgcgacgagggaagcgcgcaacagcttttccgtgggcgcatcgcgggcagtcaagaccgtctggatactattctcgatggcacgcagctcaatgaactggtgtccgggctggtgcagcaacgccaactggtgcgtttggggcgtttgtggaccaccacgctggatgtcaattggcagcagttcgccagaccgctctgtgataacccggaaactgcgggaagcgtgcgtcgggtttctttcccccctctgccgctgatgacgcggcgtcattggctggcgcagccttccgaacaggctttgcagggccgcgttaactcgctgcatccgttgattgacgagaatatctcaacgctgtctcagcagaaattcagcaagcagttgaccggtcaggaaacctatctgcgcgaccacctgattggcagcgataaagcgcgcatgattctgccaggctctgcctatgttgaaatgatccatgcggcagggcagttagccattgaaaacgattggaaagtcgccgctattcgccacctgatgtggatgaactccgtcgaggtggacgccgaaccggttgagatagctatcgacttggttcatctggacggtgaaagcgtcaaagtcgcggtaaacaacctcaacaccgccgtgctgtcggtcgaggcagagttggtgtatcgctcgcaacaggtcgagattgccgatgaatggatcgatcttgacgcgctgcgcagccgggggctgttggaaaacgatcgcgccgccctgtatgccgagtttgcgaaaatgggcttcgcctatggtccaagctatcaggtgacccacgaacgctatcgttttgcagacgccgcgctgagttatctgcgcctgcctgactccgtgtcatcggccgatgcgttttatctgcatccttcactgctggacggcgcactgcgcacctgcctggccgtgggactgacgccggttgaatacgcgaccccgattgtgccgttttatcttggcgaactggaattccgccatccgcttggcagagagtgctacgcctacgtgacccgaacgcagtcgacggttacagacagccatgttcaaaagcatgacatcacgctggtggataccgacggacgggtgctggcacgcctgaaagagtttgcggcacgccgtcttgaaaaggaaacgactgcaaccccacgcccggcgcagcaggacgtacagtattatggctatgactggcagccgtcaccgttagtggcttcgacgccgctcgttgaggcggcgcgggttctggtgctggccgatgatagcgaactggccgacgccctgcgcgagctttacggcgagcggggcagtgtgattaccgtgacccacggcgctgcctttgagcagcatgacgtcagtcgttttagcgtcgatactcagtctccgtcgagccttgaggcactgtgcgcacagctgaagtcccagcaaacgtggccgacgcatatcgtgcatgcggtgggcgctgacctgcattttgaccatttggtggagtctgggatcccttccatactgcacgctggtttacagtcgttacgccatctgtttgtggcgttggaaaaagcgcagccgaggcaggtgatgcgctgtgtgaacgtctatcgcgcacagtcctctcaggttgagccacagcatgacgctatcagtggctatgcgcgttcgctgttgaccatcaatcaccggtttgaactcttcacgctgcgcagcgatgccgatactgcggcggcgctcgcgacgcaagtctatcaggaatttgtacagcgtctggcctcgctccctggacttgagctggcttaccggcagggtcaacgccaccagcgccagctcaccgaaatcgtgccgccgaaagccgagggcttggggtctgtcgaaccactgcctctggtacgcggcgggcattatttaattaccggcggtgcgggcaagttggggctgctgatggcgcactatctggcgtctcgttatcaggcccgggtggtattgagtggtcgttcagcccagataaaccatgaggttcaacagcagattgccgcgatgcgtgagcaaggcgctgaggtgttgtatgtcgcggcggacgtcgcgctgtacgggcaggcagagtccctgctggctgaggcgaaagcggcatttggtgcgttgaacggcgtgctgcactgcgccggtgttgccagcgatacgccgatgaccgagctgcaagaggctgaattcaatgcactgattggccctaaaatcgacggactggtggcgcttgaccgcgccacggcgcaggagccactggcggtatttatcaacttctcctccgtttctgcggtgctcggagatttgggttcaggggcttacgcggcgggcaatcgctttatggatagccatgcgctgtggcgtaatcaacaagtcagcaaagggcggcggtccggtcagagcctctccgttaactggccgctgtgggccagcggccaaatgaatattgccgcagaggacgcttcgctgtttgagttctcgggcatggcggccttgcagcaagaggcggggattattgccctggagcgcgctctgctcgaacagcgccccgaattgctggtggcggtgggagaccgtaataaggtggcccgcgcgctgcgcatcccgttcaacgacgtggtcgacgttgcgccatcgttgcccgtgaacagcgcgcccgctcgcgttgagccaacaaaaaacaatgacagtgcctatctgcacagcgagaacgcgctgaggcaacatatctctaccgtcaccaaaatcccggcgtctgatatcgccgtggatgccacctttgagcaactcggtatggactccatcatgctgatggagctgcgtgcgttgcttgagaaggagtacccgggactgtcgaaaacggcaccgttcgagtacaacacgaccgccaagcttgccggatacctgtgcgagcgttacggtgtcacgcagtcgacgccttcggtggccacggtcaatcaccgtccggctagtgtgacagcggcaccggcattcaaacgcgtactcaccgctgcgacagttaacgtctcgggttcgccttttgctcgtgcggcctcgctttcttcaacgcccgccgatgcagacagcgacgccgtggcgattatcggtctggcgggcgagttccccggcgtcgacaatttgaccgacttctgggcaacgcttcaggctggcaaagagaatctgaccgctattccgcccgcgcgctgggccgctgtcgaggacgacaacggcaatccacgctacgtcaatcgcggtgggttcctcaacaaggcaaacgtcttcgatcctgacatgttccgcatgagcagcgaggaggcaagccgcctcgatccccaggtacgcgtgctcctgcgttccgcctggcacgcgctggaagatgcaggatatacgccgtcggcgctcaaatcccagcaggttggcgtctacgtcggcgcgatgaatgaagacttcacctgggtgatgtccgaatactatgcccgcaccgggaattatccgggcgcaggctcggtggtcagcgagctcgccaaccgtatttctttcctgatggacctgcatggcccgagttttagcgtagcgaccacctgtgcttcatcgctgaccagcgtacatatcgcgcgcaaagccattctcggcggcgagtgcgatatggcgttggccggtggcatcaacctgagcctgcaccccagcaaatacatgctgctgcaggacatgaaagtgctgtcttccgatggcaaagaacacacctttgacgagcgcgccagcggcctgatcccgagtgaaggcagcggaattgtggtgctaaaacgcctgagcgcggcgctggccgacggtgacaccgtctatggcgtgctgcgcggttcaagcatcggtcatgcgggaaccggcgcgggcaatatctgcccaatctggcggtgatggaagaaaccgccgcgcgggcgctgaaagaatcgcgcattgatgtcaatgagctgacctatatcgagagccacggtgcggcgaccgagttgggggaccctattgagctgaaggcgttgtccaacgcgctgcgccgccaaaccgaggcgcaacaattctgcgcactggggaccaaggctaacctcgggcatatggaagcagcatcgggtatctgttcattaatcaaggtgttgttgagcatgcagcatggccgcctgtcgccgtgcgtcaaccttaaaaacgtcaatgcttcgttcgagcaccagacctcaccgttcctgttcccgcacgaggcgcgagcttgggacaccaacggtcgcggcacgcgtatcgccgggatcaactcctacggtatgggaggctcaacggcgtttgtggtggtcgagtctgcggagcaggtgttgatgcaaagccctcgtccgacgcccgtcgagaatgcgccgcaaatagtggtgttgtctgcccagcgcgccgagcgtctgctggcctacgccgccgagatgcgcgactttgtcgagcgacagggcagtacgctgcgtctcgccgaccttgcctataccagtcaggttggacgcatcatgcttgaaaatcgcctggcgattgtggccgtcgacgccgccgacctgctggcgaagcttgagcgttttattgcgcatcctgaggccacgcacggtgatgcagacattcacagcggcaacgttcacgacgctaaagaagtctcgcagcttgttgccggtgaggccggtaagcatttcatcacggcgctgttgcaaagccagcagcttggccgagtggccactctgtggtgccgtggctgcgaggttgactggagcctgctgcacctcaacgcctcacgccgccgcgtggccttcccaggctatccgttcgccaatcaaccttgtgacctcaacgccgcgctggcgctcgatatctcgcgccgtaaagcccgcaacagtgagttggaggccatgaaacgtgccgcagagaacgtactcccagcggtaccgcaggcgtggtttgccagcacgattgccgagtgccaggcctccgcgcttgacgacgaggcgctgcacgctttctgggctgaacaactccacgccgaagatgatgtaggttcgctgattgccccggcactgttgggtggcgcagaggcgttggacgccgaggacgcagagcagcctctcattaacgtcgagagacaaatcagccaggacacggttgatgcgctgcaaatctgtacccaacgcctacaggtaactctcgaaacgctggtggttgcgggctgggcgctgctcgctaaccgacacgtgcgcgtcaagctctctcagtttggcgtgatccgcggtttcaacaatgaagcgctgcgggtcatccctgcacgcattcaggtagtaggacgccacaaggtcgggccatggctcggcagcgttgagcagcagctggagaaatatcttgagcatgcggccgccacccttgggcagatagagcactgggttgatgacgcgccgctgtttgacagcgcggtggccatcctcgacgacagcgcgactgtcaacgtgaacgatgccgtcgccgtgctctttgccgtgcagccggatttgcatttggcgctgttggtcagcgtcgaggcgcacagcctgagtctgcgtattgactgtcgtgggttagacaccacggaagataatctgaatcaactgctcgaacagtgggtcactctgcttgagggcttagccactcacctggacaaaaatcctgccgcactcccgatgcgcagcaaaggcgaaggacgcaaggccttctggaaaacgcttgaacaacttaaccagcaagagcaactgtcatgaaagtattgatcaccggcgcaaacggattcgttggccttaacgtggtaaaagcattagtcgccgcacagcatcaggtgaccgcctatgttcgagcgtcctccaacgtgagttttctggtgcctttcggcgtcactctggtacgcggcgagctgcacgacagtgcggcgttacgcgcggcaatggctgggcaggacgccgtcattcatacggcgggcaataccagcagcaatccccgcgactggccgcttctcgaggcggtaaatatcgaagggactcgccgggtgactgacgcagcgcgggaaaccgggatagctcgcctggtgttcaccagcaccacctcgacgatagggcgcgcaacaatcctcaggtcgagtcgaccgaggagaccccgttgcgcggttttcgcgtcaataatccctatgccaaaagcaaattacaggccgaggagtgcgtctatcgcgcctgcgatcgcggtctgtccgccgtcattctcaatcctgccgaagtgctgggcgcctacgactactctatgcagtggggccgtatggtgctggcggtgacctacaatcagttgccgtttatgcctccgggcggggccagcttctgtggcgcagcagccgtcgccgaagcacacgtcagcgcattgacccaagggaccgcaggcgagcgttacatcatcgccggtgtgaatgtgcgttataccgagctcatcaagacgattgaggcggtcacccagtgtcaggtctctctcccccagaccccgtattcgtatttctatctcaaaacgtggctgcaggaaaaattcccgcgactgatccccggcgaaccggtgttagacgcctatcgcctgcgggtgttcaaaggaagctattacttcagcagcgccaaagcagaacgtgaactgggctatcagcctgcttccctgagtcagatggtggaggagtgcgccacctggtacagggctaacggttttattgcttccgcgccgtcggaatctctcgcagtgacagaatagacaaccaaggggtttttataatggatttccatgagctgatagaactggaacgtaagcctttcaaagagcgcgtgaaattgcgctacagcgcctatctgaaagagctagagaaaggctttatgtttggacgtcagggcgacggacccgtcgatgcgcagatgtactacaaggatttgcacagcgacaccttcaacaacgtgctggtgtttggctcaaacagctatctgggactggccaaccatccttacgtgaaaaataaggtggtcgaggcggtagagaaattcggtattggcaccggcggttcaccggctttttcgggctatacccgacagcacaaagagttggaaaagcgtctggcggcgttagcaggccatgaagacgccgtgctgttgccgagcggatacatggccaacctgtgctgggtcaatggcctgatgaatcgcaacgatatcatcgtctacgaccagaacagtcatgccagcgtaatcaacgccatcaaaatgaccagcgtgccgttctacacctttgacccggaacgtctggaggatttcgaccagatgctgcacaagattcgtgagcgcaccaagccgggcacgcagattttctcgacggtggaaggcgtgcgctcgaccgacggatcgatcatcgacctccggcgttacatcgaaatctgccgcgcgcacgacattatcactatcctcgatgacgcgcacggtctgggcaccgtggggccaaccggcaagggaacgcttgagcatctggatctgctgggtcaggttgacctgcgtatgtccacctgtagcaaatcgctcggcgcacagggtgccttcgtttccggcaaaagcgagtacatctttatgctgcgccactttgcttatccttacctgtttacctccggcctggcccagccgacgatcgcggcgatttccgctgcgctggacgtgatggaaaaagagccggagcgcattgagcgtctgcatgacaacgtgcgctacatgcaggaccagctcgaagcgaaaggcttcaacatccttcgcgggcagtccgggatcattcctgttttcttcgaaaaaatctccgtggtgggcaacatcaatcgccgtctttttgaacgcggtgtctttgccaacatcatggaatacccgatggtgccgcccgacaaagaacgcctgcgtatttccgtcatgtcttctcatacccgtgacgagatagacagggctgtcgagattattgccgaagttgcgcgcgaatttgacgcgctgtaatcgagtggattgggagacaaaaacagtggatcaaaaagacattctgagcgtggttctcgacacaattaacgatatcaagaacaccggttttacccctgacgtcgtggatttagaggcatttcttgggggggaattgggcgtggattccgtcgagatgctcgagtcctggtacgagattgagaagaagctgaacatcaaggttaacgacagcgaaaagcgggcgatttacacgctcggtgacctgattggcaagattgaagcgcatcttcctgccgaagccgtcaaatcctgaacgaaatgacaatcctgggaaacagtaataggcgacttatgtcttcttcaatttgggtatttcctggtcaaggatcgcagcacaaagggatgggagaggcgctgtttgcgcgcttcccagacctggtcaacgaggctgatgaggttctcggttattcgattcgcgagctgtgcctcgaggatctcaacggggtgttgggcgaaacggaattcacccagcccgcgctgttcgtggtttcggcgcttggcctgctggcccaacgtgaggacgggttggcggctccgcagtgctatgcgggccatagcctgggagagtttgccgcgctgtttgccgccggggcgtttgacttcgccaccggtgtcgcgctggtgaaagagcgcggcaggttgatgtcgacggcaccgaggggggcgatggcggccgtggtcggtctcacgcaggcgcgggtggccgaactgctcgccggatcggcatttaacggtatcgacatcgccaacgtcaactgtgcgcagcaaatcgtgatttccgggctttatgacgacatcgttgcctgcgaaacgctttttacgcaggcgggagcgcgctacgtgaagctgaacgtgagtgcagcattccactctcgctacatgcgcgatatcgaacaacagtttaagcagtttgcacaaagcttcactttcaacccgcttaatgcgcgggttatttcaaactacacggcgctcgactatccacagaccgattatctctctctgttaacccggcagataagtcatccggttcgctggtacgagagtatttctcgcctgctggcgcagggcgaggtcagtcagcaggagattgggccggggcaggtattgaccagcctgttcgccaaaataaaggcccagccgatgacgctgtcggcagagccaaaggggctaaacgcggccagcgccgccaaaccgcgcgtggtgtttatgtacggcgggcagggcgcgcagtattacggcatgggcgctgaactttaccgacgcaacgctgctttccgcagccagatggaccagtgcgatgcactttatcgccagcacacggggcacagcctgctggagccgctgtatgacgagacgcgccgccacctgccgctcaccgatgtcgtcttgtcgaatgcggcgctgctgagcgtgggcgtcagtctgacccgcgtgcttggcgcggaaggggttgaacccggcgcagtggtgggctacagcctcggtgagtgcatctcggcggtggttgcgggcgttttgacgctggacgacgccatgaaactgctggtgaatcaggcgcgcctgctgagcgaaaaaaccgccggcggcggcatgatgagtgtgctcgcgccggtggatcacttccacgcccattctgcgctgtaccagcacaccgaattagccagcatcaacttccagaaaaattttgtggtcagcggggagctccagcgtcttgctgcactgaaggaacagctgacccaacaacagattatctcgatgctgctgccggtcgagcagcctttccactccgccgggatagccgccatcgaacaagatttccgcgcgctggtggggacgttagccatacagacatcgtccctgccggtgtactccgccatgtcaggaacgtcggtggcgcggtgggacgacgagtatttctggcgagtcctgcgggacagggtcgatttcttcagtttgatgaaggttttgagcgagaacagcgacgcattttttgtcgatctcagcccgagcggcaccttgtcaaccttcctcaaatacggttttccaacgcttattcagcacggtacggctatcaatcaattcggcaggaacgtcgaaagcatatctaacttactgaatgagcttaaaaaacattccgagcaagctgtcacggagggagcgtaatcaatgactatggtgcaggataatatgctcttgccgcgcgaagagacggcgttggtgtactgggaacagtacctgagcggcgcgcaaagaacagcgaacgccaatctggcaaatgccgccgacactgaggcggcaaacgcggcctcttcgccgccgcaggcgcgcgtcagtgtgcttgttgcgccggttccggcggcgctgagcaccgcgcttctgtcgcaggttcagcgtgagtcactgtcgctggaggttctgctgtcggccgcatggggtctgctgctgagcaagtacagcggcgaagaggacgtgctgtttggcatacagctttcagatgctgaagcgcaggcgagccaggcgtttcccgtgaggatgcacctcgatgccgacctcgccctgagcgactggtttaatgatattgccgacatgttcgagcagcatcagcgtcatgccgacgccttgcctgccggcgtgcaggccaacgaagcgcttttcgaatcgctgatcagtgtgcatcgcgccgcgtctatagaatacgtctccgcgccgttgcagctgattttgcatgccggtagcgaactgtcgctggagctgcgttatggggcgagcgacttcggcgatgccgatgcacagaatcttctctatcgcgtacagcagctgttgacctgctttacgcagggcgaaaagcgcacccttggcgaacagtctctgctcggccgcgatgaaatcgaccgcgttattgaacagtggaatgccaccgagctggacgtggcgctggaccgctcactctacacgctgtttgccgagcaagtcgcggccagaaacgaggcaacggcgctggtggcggacgatgtgcgtctcagctatcggcagctggccgaccgagccagacagattgccgccgggctgcgccacgtgggggtcgctcagggcgatcgcctggtgctgagcatggacaagtcgccggagctgatcgctgccatgctggggattatcaaactcggagcggcctatgtcccgattgctctggacgccccgagcgagcgccgtgcgtttatcatcaacgacgcgcaggtacgctggacgctgacgacgcgggcggatgctccccgcttcgccgagcaagagagcagcactttgctgttcgtcgatgattatctcggtcaggtcgaggaccaggatgaacctgttgacgccatcgattcacgcaccattgcctacatcatctatacctcgggcaccaccggtacgccgaaaggcgtcgagattgcgcagcgcagcctgatcaacttctgcgcctggtgcgaacacctgggcattttcagcgccgggcagcccattactcagtttgcgccttataccttcgatgcgtcagcaggggagatttttggcacgctaacgcgtggctgcgaactgcacctcctgtcgaatgcgcttatccaaaatcctcccgcgttgacggcgtatatggttgaaaacgacattggtttttcggccttcccgcctccttatctggcgcatctcgacccgacgcaggtaccagagggcatgacgctgctcactgccggttcagccccactctggcgctgattgagcgctggagcgagcgttgtcgctatatcaacggctacggtccgaccgaaaccactattatgtcctcggcatggatgcggggctttgagcagactcaggagagtcgtctgagcatcgggcgaccgattgccaatacccggatgtacgtcgtcgataacttcgggcagctttgtgcaccggggatgacgggcgaaatctggataggcggcgagggtgtcgcggtgggctacgttaatcgccctgagctgacggcccagcagtttattgccgacccctgggtggcgggcgctagggtctatcgcaccggggatattgggcgctggtttgaagacggccgcatcgagttcctcgggcgtcgtgaccaccagatcaagctgagcggttaccgtatcgagctcggtgaaatcgagtcgcgcattgcggcgctggcgcaaatcaaggaagccaccgtgataggtctgttgccagagtcgggcgaggcgcgtctggtggcctatgtcgtcgcggaaaaaccttgcgggaatgaggtgattgcgcagtggcgtgaggtgctcgccacccagctgcctggttatatgatcccggcggcgttcgtggtgatggactcgttaccgctgaccgccaacggcaagattgaccgtaaagcgctgccgttgccggataacagcgcttaccttcagcgtgacttcgacgcgccacgcgccggaacggaaaccgtactggcaaagctgtggcagaccttgctcggcgttaatcaggtgggtcgtcaggacaacttcttcgagctaggtggccattcgctgctggcgatgcagctgaaggcgaaactgcttgagcagaacctgtataccgatgtaccgacggtcttcgcgtatccggtgctggccgagcttgcggtacacatcaggcgggaagaggatgccgcatcgacgtttgccgtcccggcaaatctgattgcgccgtcgactaccgcgctgcatcccgagcattttccgttggtctcgcttacgcaatcgcagatagaccacatcgtggcgcgggtcgcgggaggcgtcgccaatattcaggatatctatgcgctggcaccgctacaggaaggcattctcttccaccacctgctcgaggagcagggcgatccttatctacagcgtggacatttgtcgtttacccatcgtgagacgctggataattatcttgcggcgcttcaacgggtgattgaacgccatgacatcctgcgcaccgccttcatctgggaagggctggagaagccggtgcaggtcgtcctgcgtcaggcgcgtttgcatgtgcaggagcttcagctggatgccgatgccgtcgtagagcagatgaaggcgcgtcttgaccctgacgtccaccgcattgacctgacccaaccgccgttactgcatatattagtggcttatgatgaaacgcaggcgcgttggcaagccttgatgtatatccaccatctggtggaagacctcgcctcgttgcagattatcctcggtgatattcaggcgtttctcagcggtagcggcgtaagcctgcctccggcgaccgcattccgtcaacacgtggcgcagctgcgcctgcacgccgacggccaacagcagcgggccttttttgccgagatgctggcggacattgaagaaccgacgatgccgtttaatctcaaaaccggtcaccttcacgggcagcgcatcaccgaaacccgtaaaccgcttgcggcaccgttggcagagcgtttacgtcatcaggctcgccgtctcggggtcagcctgagcagcctgtgtcatctaagctgggcgcgcgtgctgggcgcagccagtggacgcgacacggtggtgctgggcacggtgctttcagggcggatgcagggcaaggacagcgataagattctgggtccttgcatcaatacgctgccgctgcgtcttgaggtgggtggcatcggggccgtcgatgccgttcgccagacgcataagcgcctcaccgcgcttatcaaacacgagcacgcgacgttgtcgctggcgcagcaaggcagtgggatagcgcctccgacgccgatgttcagctcggtattcaactaccgtcacaaccgtcctaccgaggtggatgtgctggggatatcgaattcgacggcgtggtttggcacggctttgaggagcggacaaactatccgatcaccgcctcggtagatgattttggcgaggcgatggacatcagcgtgcagactctgccgtcactctccagcgaacgcctgtttggctacttccagcaaagcctgctgagtctggtggcggcgcttgaggccgatattccgccttccccggcgcaaataccgctgtatgagctcgagattctgccgtcgcaagaacgtcagcatctgctcaaaaccggcaacgatacggcggtctctttcccgaccacggcgtccatacatcagctgttcgagcagcaggtcacgctgcaaccgcaggcgctggcgctccaggcgggcgaggtgagtctcagctataccgagctgaaccagcgcgccaatcgcctggcccattatctcgtcgcattagggattacgccggatacgcgggtgggcgtgtgcaccgaacgtggcgcaacaatgcttatcgcgctgttggccacgcttaaggctggcggcgcttacgtgccgctcgacccggaatatccgacggcacgattagcctacattctcgacgatgccagtccgaaagtgctgttggtggacgggcgcgggcgtgagctgtttggcgagcagccgggcaacactctcacggtggtcaatctggacgtcgacgggccgcactgggaggcgttgccggtcagcaatcctgcggtcgtcaccctgaatccacgccatctggcttacgtgatttacacctcggggtcaaccggcaagccgaagggtgtgatggttgagcatcgtcaggtggttaatttcctgagcggaatgcaggcgttgttcaatctgaccgcgaaggaccgcctgctgtcggtcaccagtatctcctttgatatcgccggacttgagctctatttgccgctgatgaccggcgcgtcgattgtgctggcgagccgcagtcaggccatggatcctcatgcgctgctcaagctgttgcacactcacccgatcaccctgatgcaggcgacaccgactacctggcgatcgctggtggatgccgatacaacgcctcatccgcagttgaaaattctctgcggcggcgaagcgttgccaagggatttggctcagcgtctgcacgtttttggtgagtcgctgtggaacctgtacggaccaaccgaaaccactatttggtcaacctgtcatcgcgtcgaggcagaggacgtcacgcactacaaccaggcgattggccgcccgattgccaacacgcaggtgtatctgctggacgcacacggcaacccggtgccgatgggggcgatgggtgagctgtacattggcggtgaggggttgcacggggctatcacgcgcgtcccgaactgaccgccgagcgttttattgccgacccgttttcaagtgactctgccgcgcgcctctatcgcaccggcgatttcgcacagtttttggccgacggacgcctggtttaccttggccgtaccgacagccagctcaaactgcgcgggcatcggattgagttgcaggaaatcgaggcgcatttagtgagccattcgctggtgcgtgaggccgtggtcgttgcacgcgaggacatggccggtgaggcgcgtctggtggcctatgtggtgccacgttcccgtgaagaaagagcagaagacgttccggttgaaagcaccagccttgattttagcctgttcttctttggtgcccataccgatgcccagcgcggatatcgcgattacgccgaggcggcagagtttggtgataaacacggcttcaccgccgtgtggacgccggagcgacacttccacagcgtcggcggactgtatgccaatccggcgttattacaggcctcgctggcggccagaacccgcaacatcaagctgcgtgccggcagcgtggtgttgccgctgcacgaccccgtttccatcgcagaaaactggtcgatagtcgacaacctgtcgaacggtcgcgtcgggattggcattgcttcaggctggaaccagaaggacttcgtgctggctccgcaaaactacggccccgtcgggacgtgatgcgtcagggcattgaagagctgaaaacactgtggcagggcggcagcgtgacgcggcaggacagccaaggccacgacgtctcggtggcgatttatcccgtgccggtccagaaggagctgccgatttggttaaccgccgccggtacgccggaaaccttcgagtatgcgggcagcagcggggcgaacgtgctcactcatctgctcactcaaagtatcgatgggctcgctgaccatatcgcgctttaccgtgccgcacgagaaaaagccggatttgaccctcgcagcggcaaggtgacggtgatggtccacacctatcttgggcacatctcgacgccgtgctaagccaggctaagcagccgttcttcgactacctggaggggcatctgagcctgctttctggctggctgagggagcagaacatcaatctcgaatcgctgccgggcgaagacaaacgcagcatgctggaattcgcgttcaagcgttatacccgcgagctgtcgtttatcggtacgccggagtctgcgctgtcagtggcagagcagttgcaggagattggggtgaacgaggtggcctgcctgattgactggattgagccacaagatccgctgtcggcgctggagcatctggcgaagctgaaaggcatggttcagacgctgtttggccgcaaggcgttacgtaagcatctacaggacgcgttgccggactacatggttcccgcggccttcgtgatgcttgaggctttaccgctgacgccgaacggcaagattgaccgcaatgcgctggtgccaccggatgagatgtccttcacccgtcgcgcctatgcggcaccgcagggcacgctggaaatcaccatggcggccatttgggaagagttgctgggcattgagcacattggccgtcaggacaactttttcgaactcggcggctattcgctgttggcggtacgcctgattgaacagctgcgccgcagagggctcagcatcgaaatacgcacactatttgatacgcctgttttggccgacctcgcggccaaaaccatcgagctcgcggagacccgactgtgaagacgttattcccgatatttttgcaaaacgacagtgcctgttgcatcaccttgcattacgcaaaacaccctcgcatagaagctattatcatggagaacaaataatgagcgatttcgaccagttactgctgactctggaagaggcaaaaatctcgatctcgctggataacgaggatttggttatcacggcagccaagggtgcgcttaccagtgagattaaaagtgcgcttcgtgagcacaagacaacgatggtgaccgcgctgcgcaacggcaaacgcctgtccaacgcctttgaggtggtggttccggcgaacaagattacccccgagacgaccactatcacgcctgagctgctgccattgattgattttacgcagaaggacatcgatcaggtggtcgatcaggtgccgggcggcgtcagcaatattcaggacatctattcgctggccccgttgcaggaagggatcttgttccaccacatgctggcgagcaagggtgacccgtatctgcaaaccggtcagatgaccttcgatagccgcgaaaaagttgataactatctggcggcggtgcagcaggttatcgaccgtcacgacatcatgcgtaccggtttttactgggaaggcgtctccacgccgtgtcaggtggtgcaacgccgcgcaaaactgcacgtgctggacgttgagctggacccggcgaacggcccgattgccgagcagttggccgcgcgtttcgacccctcacactacagcatcgatttggctaaaccgccgctgctgcacgccttcgtggcttacgacaggcgcaatgagcgctgggaaatgttccgcgttctgcatcacctgattgatgacatcacttcggtactgatcctgtctgccgaaatccacaccttcctggcagggcgcggccatacgctgccagaggcgcagccgttccgtcgtctgattgcccaggtccgtttgggcaaaagcccggaagagcacgagcgttatttccgctcgaccttaggtgatatcgatgagccgaccgcactctatggtctagtcaatctgctcgatgactccgaaattattgaggtcacgcgcaaggtgccacagcgtctcaacgacgtgctgcgcggctatgcgcgtcgtctgggcgttagcctcggcagtatctgccatctggcgtggggcaggtgctggcctgcatcagcggtcaggactcggtggtattcgggaccattttgtttggccgtatgcacgccggtgaaggcgcagaccagatcatggggcctttcatcaacaccctgccactgcgtctggatatgtacggcgcgagcgttgaggaaagtgtgcgtgcaacgcataaacgtttggccgaactgctcagccacgagcatgcgtcattggcgctggcactgcgttgcagcggcatcaccggctcaacgccgctgttcaatacgctgttcaactatcgccataaccgcgaatcagagagtaaatcgctggatttcgtggtccctgaggcagaccagtgggacggctttgaagagcgtaccacctatccgataacgctctccgttgacgactatggcacagcgctcggcctgaatattcaggtggtcgattcactggatcccgagttgctgtttgcctatatgcagcacgcgcttgaaaatatcgccaaagcgctggacgaagcccccaacacgccgatgcagcagatcaatattctgcctgccgcagaacgccatctgttgctgaatgaatggaacgacactgccaaggtttatcctgaggttgcctatacccaccagatgttcgaggagcaggtaaaacgcacgccttccgcggttgcgttgcgctttgggaatcgcaaactgagctacgccgagctggatgccttgtccaaccaactggcgcacttcttacaccaaaaaggggtaaaaccggacgatcgcgtggctatctgtctggaccgcagcatcgagatggtggttggcctgatggggattatcaaggccgggggcgcctatgtgccgcttgaccctgattacccggtagaccgcctatcctatatcctgcaagactccgcgccgaagctgctgttgctcgacaaacgcgggcgcgaaatcaccgccgggctagatacgaccggtgttgtgacctttgaccttgacgccgagtctctggcaacctcttcgctgcccatcgagccgttatcgcctgccgaactgggcctgacgtcgcacaatcttgcctacgttatttacacctctggctcgaccggtaagccaaagggtgtggaaaacgaacaccgtggtctgatcaaccgcctgcagtggatgcaggatgcctatcagctcgacagcagcgatgcggtattgcagaaaaccaccttcagctttgacgtttcggtgtgggagttcttctggccgctttccgtcggggcaacgctggtggtagcccctccgggcgcgcacaaagatacgcaggcgctcgcacaggttattcaggcgaacaacatcaccaccatccactttgttccgtcgatgctgaatctgttcctggccagcgacggcgcgacggcctgccgctatctgcgccgcatcgtgtgcagcggtgaggccctgagttcggcaagcgttgccacctgccaccgcgtgctgcctgatacggcggtgcacaacctttatgggccgaccgaagcggctatcgacgtgacggcctggacctgccccaaagatttaccggcgacggcgattgtgccgattgggcgtcctatcgccaacctgcgtatttacttgctcgaccagcaccagcgcccggttccactcggcgtggcgggtgagctgtatatcggcggcgtaggcgtagcgcgtggctatctcaaccgtccggacctgacggctgagcgctttatcagagacccgtttgcctcggatgccaacgctcgtatgtaccgcaccggtgacctggcgcgctacctgcataacggtgacatcgagtatctcggacgtaacgacaatcaggtcaagatccgcggtttccgcatcgaactgggcgagattgacgccgcgttgcagaaacagccggccattcgtgaagccgtggtggtagcccgtgatgatgcgcaaggcgacctgcgtctggtggcttatgtggtgctcgacgcccgcgcagacgcagaaggcctgagtacgtctgagcgcatcgcacagtggcgaaacagcctggccgcccagttgccggattacatggtgcccgccgccttcgtcaaacttgatcaacttccgctcaccgctaacggcaagctggaccgcaaagcgttgccattgcccgatgactcctctttcttccgccgcacctacgccgcgccgcagggcgatgtcgagattgctatggcagagctgtggcaggcgctgctgggcgtggagcgtatcggtcgtcacgacaatttcttcgaactggggggacattctctgttggccgtgcagctgatggagcatctgcgccagcgcgatttaagtatcgagatccgcgcgttgttcgaaagcccgaccctggcagagctgtctgagcgtaccgttgaactcgatgagatgagaatatgatggattttgatgaccttttgcaggcacttgacgaggccaacattgccttgtcgcttgatggcgaatctctggtcatcaaggcagccaaggggtctctgacccctgatatcaagacggcactgcgagagcacaaaccggctcttgtcgatgccctgcaacaggggagagatttctcctctcagggggaggtggcggttcacacgtgccggtgaatgtgataactccacagacgacccacctgacgccggatatgctgccgctgattgacctgacgccggacgatatcgcgcacattgtcgcccagattccaggcggcgtagcgaacgtgcaggatatttacgccctgacgccgttgcaggagggcattctcttcctgcatcggctgagcggtaaaggggatccctatctccagttcgccaaggtctcgctggcaaaccgtgaggtgctggtgcagtacgtcgaggccgttcagcagaccattaatcgacacgatattctgcgtaccgcgtttctctggcagggactgtcgacctcggcgcaggtggtgttgcgtcatgcgcccgtgcagttaaccgaggttgagctcgacccggccaatggcccagtgatggaccagttggtcaagcgctatgacccggcgcactaccgtgttgatttgactcaggcaccgctgctgagcctatttaccgcccaggacccgcacagcgggcgctgggaaatgatcatgttgcaacaccacctgatcgacgatatcgcctcgttgcagataatgatccaggatatccgcgcctttatgctcgggcgtgggcagttgttacctgcgccaccgccgttccgccgcctgattgccaaaatacggtcatcggcctccgaggcccagcacgagcagttctttcgcgcgatgctgagcgatattgacgcgcctacgctgccgtttggcgtcgcgaacgtggcggtagacaacgcgacggtggtcgaacttcgccgcaatgtcgacgcgaccctggttgaccgcctgcgtgcccacgcgcgccgtcttggcgtcagcatgggcagcctctgtcatctggtttggggacaggtcatggcgcgcgccagcgacagcgatacggtggtaatgggtaccatcctgctgggccgtttgcaggcgggcgaggggccaatcagattatggggccgttcatcaatacgctgcccctccgtcttgacctcggcaacgtgggcgtcgaagaaagcgtgcgcgaaacgcataaacgtttggctgccttgctggagtgtgagcatgcgtcgctcggtttggcccagcgctgtagcgggattgcgccgccaacgcctttgttcaacgtgctgtttaactatcgccacaaccagcaggcggaggatgagtacgtcgatacgaccggcgaacgcgatgcggtggagtggcacggcttcgaggagcggaccgattatccgctgacggtctcggtggatgactttggcgatacgctgcgactcaacgtgctcgcggtgccagagttctccgccgaacgcatcatgggctatctccagcagactatgaaaagtctggcgcaggcgttggacagcagcccggcgctgccgatgtcggcgctggaaatcctgcctgccggtgagcgccgtaaactgctggtcgactggaataataccgcggcgtcttatccgtcgaatgagaccgtgcatcgcctgttcgagcagcaggctgcccgtacccctgcggccgttgcggtgattgacggtgacacgcagctaagctacttcgaactgaaccagcaggctaaccgcctggcctcaacgttaattgcccgaggcgtcaaaccgggggagagtgtggccctgctgctgccgcgcggcagcgccttgctggctgcgacgctggccattctcaaggcgggcgcgacctacgtaccgctggacccgcttgccccgcaggagcgtctgaactggatgattgatgactgcgcggcgcgactggtgataagcgatgcccgtcagccgctggctgcgggcctgcgcctgccggtgattgacgttgaaagcgatgaagttgcgcgtgccagtagcacgcctgtcgtggtcccgagttctgccagccaggcggcttatatcatctacacctccggctcgaccgggttacccaagggcgtcatggtgccgcaccgtgcggtgaatcgtttggtgattaatagcggcgtgggcgttttcgagccgggcaaccgtatggcgctggcggccaacaccgcctttgacgccagtacgctggagatttgggcaccgctcctgaccggcggggcctgcgtggttatcccgcaggataccttgctgtctccggccgcgctggtgcgcgtgctcaggcagcatgacgtgaaccagatgtggttgacggtgggcttgttcaaccagctttatagcgagctggcaccggttatcccgcagttcacctcgctgtttgtcggcggagacgcactcgacccgacgattatcgctcaggtactgcgtgcgtctcctgcagcgaagctggttaacggctatggcccgaccgaaaccaccaccttcgcgacgacctacccgattgatgcggcctccgccaattctaccggtattcccattgggcgtcctattggcaacacccgcacctatgtgctggataaacaccagcagccggtgccattaggtgcggtcggcgagttgtacattggcggcgacggcgtcgcactggggtatctcaatcgtgaggagctgaccgctgaacgcttcgtggctgacccgtttgttgccgacgatggggcgcgcctgtatcgcaccggcgacctggtgcgttatcgggaagacggcaatttgctgttcgtggggcgcaacgatcagcaggtcaagctgcgtggttttcgcatcgaactgggagagatcgaggcgcgtctggccgagcatcctcaggttgagaaagcgcgggtgctggcgctcgatagtggcagcggcaagcgcctggtcgcttacgcggtcagcgctgtgcctgaggcggagttacaggattatttgggcgagcgtctgccggattatatgctgcctgcccgtatcgtcacgcttgagcagttcccgttgacgccgaacggcaaggtggatcgcaaggcgctgcctgcggtggagtttagcgaaaccacggcctatcgtgcaccgcgtaacccgcaggaagagacactctgcacactgttcgccgagctactccagcagccgcgtattggcattgatgatgatttctttgcgatgggcggccattcgattctcgctaccggtttgattgcgcgcatccgtacccgtctgggcgtcgagctgccggttagggttctgtttgagaatccaacggtggcgagtctgtccaggcatctcgatacgccaggcagaattcgtcaaccgttaacccagattaagccccgtcctgcgccgctgccggtatcctacagccagcagctgatgtgggtcggtcagaacactcgcggggataactcctcgctcaacacgccgatcgtcgtctcgctggaaggtgacctgaatctggcggcgttaagggccgcgctgtacgatctggtggaacgccatgaaacgctgcgcacccgttttgcggtagtgaatggtcagccggtgcaggtggtctcaccccttgctgacgttcaactcgacgtcccttgcatcgatgtcggcgttgagcaggtgaatcacaccgtttttgaggcgattaggcgagttttcgacctcgccgttgatttccccttccgtccctcgattttacgcgtcggtctacggcagcatattttggtgatgctgttccaccatattgcctgtgacgcattttcacttgcgccgttgacacgcgatctgacgcaggcctataaggcacgcatcgccggtcaagcaccgtcattcattccgttgccggttcagtatgccgactacgcggtgtggcatcgtgagctgctcggcgatcctaaccagccggacagcctgtatgccgaacagttggcctactggaagaaaacgctcaacggcgtgcctgctacgctggccctgccgcaagactttccgcgtccggaaaagccgagctatcgtggggaagtcttgccgctgcaaatcaacgccggtctgcaccagcgtttaagcggactggcgcgcgagcgcaacatgacgctatcgatggtgcttcaggcggctctgggtatcttctatacccgtctgggtgcgggcgaggatattccgctgggggccattttggcgggacgcagtgacgaggcgctgaacgagctggtgggatgtttcctgacacagtgggtgatgcgcgtcgatacctcgggtaatccgcgcgtcaacgaggtgcttgagcgggtgcgtacgcaggcgttaacctcctacgatcatcaggatattccctatctcaagctggtcagcgagcttatgccggtgcgttcaccgtcgcactatccgctgttccagacgatgatgattctgcaaaacacgcctgcggaaatgttcgatgtgcctggcctcgacgcccgcgtgtttccggcccacagcggcaacaccaagtgggacctctactacatgctgtacgagaattacggcgatgagggcacgccactgggcatggacggcatactggaatacgccgtcgacttgtttagccgtgaaaccgccgaacgtctggtgacaggctatctcgccacgcttgaggcgatggtggcggctccggatgctcgggtcagcgagctgaaagtcggcaatgcgcagacggaaattcgccagtcgtcagcgtcttcagccgcggttgcgctagccgattttaatccgctgttagtgctgcaaaaaggggcggccagcgcggcgtctctcttctgtgttcctggcgctggcgcaacggttaccgacttcttgcctttcattcaggcattacccgctcactggccggtctacggcctgctgcacaagggtatcgatggcatgcatgaaccagagcgttcggttgaagccgctgcggcccgcaacttgctcgcgcttcatgaggccggatttggcgccgagacaccgattcatctattgggtcactctttcggcgggcaggtggcattcgagatggcaaggcaatggcaggcgcaaggttatcgcgtggcgtcgttgactcttctcgatagcgaagcgccccggagcgcggaagacccgttataacgcgcacgttggcggcgtgtatgcgcgaatatgtcgaaagcatcggctttaatctcgacgccgagctggatatcgacagcgcgctttacgccaacggcgacgttgaacagatgctgcacgttgtgcaccagcatcttcagcgtctggggaaaatcccggccaacgcctctgcccggctgttgaaaggtccgtggcaaaccttctatgccgcgcggcaaacgcattatatcccgacatcgcactacccgaatccgctttatctgattcaggtgcgtgacccgtggatgaccctcgaggagtgtctcaagcgtcgtgacgaagatgccgcgggctgggcgcgttgggcagaaaaacttgagaccctgacgggaccggctcagcactttaccctgttgaaaacgcctcacgtcagcgagcttgtgcaaaggtggcttcagttcgtgctgtagcactatcgaaaaatataatgagtgagtggaaatgactgagctatcacacgttgtttttgaagatattaatgcggtcccgttagaacagcttaaccctgcgcgcagggatcgtttcgcgaatgcgaccgagctgccggtatttgaacgtctgagacgtgaggatccggtgcattacaccccggaaagtgaatttgggccttactggtcactgacgttgtgggacgatattcgcgccgtgggcagtaaccatcgcgattttacctcgacggagaacatcgacctcaaatcgattgaagaaaagataaatcttgaagccgcgttgcaggcgctcggccataaacgccgtaaaaacgtcggcttcattaccatggacccgccggagcataccaaacatcgcaaggcggtcacgccgggcatggggccggccagcctggcgcgaatggagcctgtcttgcgcgagcgtgcgggcattattctcgacggcctgccgattggcgcaccttttgactgggtggataaagtctccaaggagctgaccgcgaccgtgctggcgacgctgttcgattttccgtttgaagagcgccgcaagctgacgttttggtcagacatgctgatgtgcgagccgggacgcgggccggtgaagagctgggaacacaaggccgaggagaccataaagtgttatcaggcttttgaagcgctgtgggagaaacgccgcaacgagccgccaacccatgaccttatctcgatgctcgcgcaccatcctgagacctgtgacatgacgctcgacgagtttcgcggcaccatagtgctgctgatcatcggcggtaatgacaccacgcgtaacactatctcgggcagcctctactggctggacaaatacccgcaggagtttgccaagctcaaggccaatccgaaactggtgatgtcgatggtttccgaaacgcttcgtttccagacgcctatcagctttatgagccgcgtggccaatcgcgacgtggagatccgcggcaagaatatccgtcagggggatcgcgtcctgatgtggtacctgtccggcaaccgcgacgcctcggcgattgaagaccctgataccttctgcattgaccgcgaccgcgcgcgtcggcatctctccttcggggtgggcgtccacgcctgtatcggcagccgggtggcagaaatgcagctctcggttatctgggaagagatcctcaaacgcttttccagaatcaacgtgctgggcgaaccggagcgaaactactccaactttttgcacggctttgaaaatcttaacgtcattattccaaaaggatgagcccatgcgagtcaggaggctgaagttaaggacatcaagggattgccgcgccagtggggagtgagttgatgaaaatatctattttcaccgccggctcgatgggcgacattcgcccgtttatcgtgctcggcaaacgacttcaacagatggggcatcagtgctccatcatgtcgggcgagaggaatgaaaaaatcgtcaccgaggaggggctgggttacgaccgatgggatctcgatcttccagaagctcgccaggtggagcaggggctgatggacggtgactcggctcgcaaggcggcgaaaaagatgtcgggcgtggtcgagaaactgatgtcgctgtgggtagaacaagccgtgacggcggctaaggacagccgcttgatcatcgccgcaaatcaggcggttccgctggctatgtccgtcggcgagaagttcgatattccggtggtgaccacctatttcgcgcccctgacgccgtcgagctcgataccgccgtttttcctgaaaaaaatcgtcaggctgccggggtttatcaatctcgcggtctggaaactgctgcgcctggtgatgtggcgttttgtggcgaaatcctttaccgcctgtcgtgccagccttgagctccccgactggcgttggagcggtccgtggtccgataaaagcaacggttcgagaaagatactctatgcctttagccagcatctggtgccaaggccgaaggaatggcccgaagagactatcaagataaccggcaactggttcggggaggtcagcagtacgcagacagtttcacccgaactggagcgctttatcgccgaaggggagtcgcctatctacgtgggtttcggcagcatggccagctctgatcctgaggggctgacgcaaaaaattatcaacgtcatcaaacgttcaggtgtgcgtgctgtcatcatgagcggcggtggggccatcagcgcggaaatgatcgcgtcggctcgtctgccgggcgtgctttgcgtagacagcgtgtcccatgaatggttatttcctcgggtaaaaaccgtgttccaccacggcggcggcggcaccgttgccgccgcggcgcgagcgggaacgccccaggtgatcatgccgtttatctatgaccagttttattgggcatggcagcttgaagagcttggcgtgagcggcggcagcctcgacatgaagcgcgtcggagaggatgacattgaaaacgcgttgaacaagagtttctcgaccgaggtggtaaaccgggctaaaaagctctggcagcaggtcaatcaggaaaatggggtagataacacgatttctgaattacagcactggggttttctttgaatcagcaccttgcggctttaacagacaacgtcgcggtaacggcgctgaaagtcagcggcggccgctttatcaataacaactatctggtgcttaatcggcggaccgggcaggcgctgcttgtcgacccagcgtgggaaagggagacagtcgactccgcgctaaaggcggctaacgcccagttggcgggattctgttaacccatgctcatgccgaccacatcgaccttgccgacacgttggcaaatgagcatggctgcccggtgtggatatctcgtcgggaggccgcgtcatccggcttcagcattgccgctctgcgtaccttcgatgagcagccgtgggaggccgcaggcatgcttgtccgcccgataatcactccaggccatacgccgggcagtgcctgctactggataggtaaccatctgttcacgggcgatacgttgttcatcgaagggtgcggcctttgccctgacagtgacgcggcaagccgtatgtattctagtcttcaacgtcttaaggcgatgttgcccggtaaggtacagatttatcccggccacagttatgttcagccgcctggattaacgtttgagaggctatttcgctataacgtctatttatcgttcgacaacgtggaagcatttatcaagtttcgactgcggcctggtcaggccaagagccgatggatggccttttcctagcaggttttgtctctaatttttaattgacggcgggcagggaaacgaagctgttacccgccggagaataaaaggggtacttgtgaatatgtataatgaaagttcttcaaacaatcattttgatagcgccgacaaatactctacaggaacggaggtcgcggacattgccgcgcctaaattacatttagacggccttaaggtcgggcaggtttttcacagcgcggaatattatgtcagtgcggatgaaatcaccgagttctcggccaaatatgacccgcaacccttccatatggacgacgaactggcgaaagactccatctttaagggcctggccgcgagcggttggcatacggtcagtatcaccatgaatctgttggtgaaaagcctgcctctggcgcatgggattattggcaccggcgtggagaaaattaactggctcagaccgacgcgaccgggagatatattgcgaatcaatgccaaaattaccgaaatcacaatatccccgcaaggccggacagagccagggtgaatattcatatatctacggtcggtcaggataataaagtacgtcaagagctcgtcggtaagctgcttatctttcgggtaagtcaatcctctggggctttttgaacataacaataagcgttgcgtcactatttgaagaagggatcaattcttggccactgatatttccgacaacacagcaaatattctgctgcaaggttcgatattacgttcactgactaaaattggcgtgcccgttattttggctaacctcttgcagtcaggttacatcatggtggacgccttttgggtagggcgtttaggcgacaaggccgtggcggcgatatcggtaagtcagcccatcgtttttctcgtttttgcgttgggcatcgggcttagcgtcgcggggacaacgctggttgcgcagtgtatcggggctcgcctgcatcgcgaggcgagtaacattgcgtcacaggtgtttatgctggcgctgctgttcggcctaccgatttcagtaggcgcctattggctgtcgccctggatgctgcgaacgctcggcactcaggaagaggtatttcctctggcgctcagcttcctgcgggtcatcgtcagcggcatgatatttaccttcggtttttccatgctacagtccctgatgagggctctggcgaagtccgcatcccgctgatgataacgctgggcacactgattcttaacgctgtcatggatccgctgctaatttatggctggggaattatcccggcatttggcgtgaccggtgcggccatcgcaacgcttatcaatcagggtattgccgtggtagcggggctgctggtcttgcattcgcgtcacgtggtgctgaaggtaagttttcgggcgatgaaacctcgcctggatatttttaagtcggtggttcaactcggggtgccctcgtcaatcgaactgtgcgcccatgcgttgagtgcaagcggcatgatgtcgctggtggcggtgcttggaacggcggtcacggcggcttatggggtggtcaacaacatcaatgcgctggtgattgttccggccattggcgtgtcgatagccaccgcgacgctggttgggcagaatattggcgcgggaaattttgaacgtgcgagggcgattgggcgtttaagcgcgctgatatcatttttcgcgttgacgttggtgggcgtcttcgccttcacttttgcccctgatattgtggccttctttgcccctaatcagacgccggtcattggtcatggggaaaggttcctgcatattatcgcgcctagctacggcttgattggcttacagatggcactcagcggggcttttcgcgcgacggggcgcaccatgaccacgatgacgctggcgctggtttcgcaatggctggtgcagatcccgctggcatgggggctgtcccactatacttccctcgccgtttccggcctgtggtatgcgtttcctgtcaccaacctgttaatggcggtggtgacggtcattttgtttgagcgtatcgattggcaaagctcgaggctggtagaaaaaagtcagggatagcggcgcaatcacacccacggggttgtaaagtcagggatgaaccggttgccggttcatcccttttttcttaaaccagtgaacctggtgatttaatatagcgttcaataatggcgcgtgcagtgcggatagtcagcgcaccaatggtgacggtagggttatagccgccattgttggggaaggaagatgcgccggtaacgaagaggttgtgtgcgtcccagtgctgctgaaaacggttaaggaccgacgttttcgggtccagccccattaccgcaccgcccatagtatgcgagctgtcaaacgggcgataaggtgagtaatgatcgtcggcgaaagaaacggcgcgaatgtttttgccccccacggcttcggcaatctcacgacagcggtcacgaatataggcacccgaacgacggtcattgaggttgtaatcgtaggtcagacgcagcaaaggttgcccgtggcggtctttataggtcgggtcgagatcgaggaactgttcgcgatgtgaatagctggttccttgaccctgcaccatcgcccagttttgataccctgactgaaaatcttttttccaacttgagccccactggcgatgcccggccggtatctggtcagagaggctgataggcaagccggtgtttgacagcgcctgtatccccgcacctccgataaagccgagcccggtgtggtcaaagttatcgccgttaaaatcgtcaatctgggtggctaatgcgccggtattcataaatggattcaggaattcattttcaagattcagaaacgcataggaaagcgtctggaaattaaaagcgcgccccagcgtgccctcgccagttttaggattatacatctgaccaaatttggagagcatcagcaggcgcacgttatcgagctgataggccgagataacgacgatatcggcgggctggaagccgtaatttccgtcagaatcgatgaaggttgcaccggcagccgttttaccatccgcgctcttctcaacgcgcaggacttcgcattcggtgagcatagtaaagtttttacgctgcatcagtgccggcataacacaggcgtttggcgaagacttggaccagttaccgcaaccgtaaagctggcagtagccgcagtaggtacagggtgccagctcgatatctagcgcatttttataggctgcgcctattgttcctgcgggcacgggaaacgggtgatagcccattttggtggtagtttggtcgaaaatgtcgttccagcgggagcgcaccagtgaaggggtcggatagggatggctgcggctcccttcgaaagggttaccgcccggctgtttaacgccattaataaccccggcagtgcctgacgtgccggctattttctcaaaccgatcgtagaagggttccagctcgttataagtcaccccaaaatcctgcacgataagcccatcgaccagctgcttgagcccgtagcgttctttgacggtgctagcaacctgcaaatcgtacggcaggaagcgccacgaggcggctgcccagtgcgtgccagcccctcctacgttcatccctaacgtccagttattccactcacgtccgggtaaggcggtttgattaacattatttcggatggtgtatgtttcaaccgatgcaggttgaaggatctccttgcgtacggaatagcgtaattcatcaggatcgctggtcgtcgggaagtctgcactggtttcgcgataggctccgcgttcaatggcaaccacgttaagcccggctcgggtcagctcctcggccatcactgaacctgaccagccaagtccgacaataaccacatctgctttaggtcttttatattccatgctcatatttccaaaaaataaaaattcaaaaaaaatatcaaatcataatcaggctgataggctctaattcgactcttttacctttaatatttatataatcacggtagtcgtagcgcgcacctgggaaaccaatcatcctccagccgaccatgtttttattgccgccatacaaaggatcggccagaaaaccctctttaacgttggtcagcatcaggctaaataatttattgccgttaaattcgccatagtcgaagcttcctgactccattttctcgagatagttatctttttcctcatcggaaaggtcgataaagcttttgcccactgttttttgacaatgtgcctccatcgccgccaacccggttcgataaacctgcgcaggcgtaataatggtttgctcaccttgttcgggcgtacctttaacaatggggcctagcttgtagcgattttgtgcggacccaaagggacccattaactgattatcggtaaaggtcacgcaaccggcttccgacgcactaacggagagctcgtcggccgggattaaacggtcataaacagctttaaccagcgccgcttcgcgtggggtgaaatacaccagcttgctgccatcgactatttcaggaatacgtccaggtggcgcagcccatgtttcaccgccggtgaatactttcattgctgcccctacggggcgaaagacagacgcaacggtcgcactggcaattagcaccagtccgccttttaggacttttctacgtttcacattgactccttgaattgacgcaacagggatggggatttttattagatgttaatttagtatttttcttgtgaattttggtggtgaaaatttatttaagtgtggcatttagtgtgtttttgaaggtgttcatcattaataattcggcagattgtgctagccatttttctgcgtttttggcgagtgaaatgtcaatcaaagttttgatgtgatcacatcaaaaaaggcgtttataacgtttttatctttttactgaggctggaaataacgagaagaggggcgagtctacttcagggagataatttttcaggcgcatgaaaataggttgttttaacgtcaatcccaggcctaaaaaacaaaaaaaatttaaattataaaaaaacccaataaaatctattaaatccttattttacagatatttatggttaattttctagtttccttaaactaaattgcaaattttttgatcaaaaatattgtacaggtcacggaaaattgtataactttatgcgcctcaagacggacggcagggtttttttcattttaaacccaggctgtctaagggttgtaaagaacatatttagataacggcaaaggtgcgcgagtaaataattattcgccgatcttcagtgctgagtgggaattttcttagagaatttgaatttaaattatgggcaaaattaacaccttaatgacctcaaaaataggcccaatttttgaggtatttttgtacgatgattctaccgcgaatcgataaaaataaactctgcttagataaattattcactcaaataatttacgcaggtgactataaccttgatgatcgtaatgcatgcaatgaatcaataaaaaagtgtcatttcagaccctgctatcgagaggattctcaggaatgatgctagcaataggttaataaataaatattagaaacattctagtgtgcatttaaattctgtatgaattttttccagggtaatatatgaacatatttaagttggcgttcttttctttgctgttactgccggcgtgtgttttttcccaaacgcggctattggacaatgcttgtaatagtatcgacagcaaggtgagtaataccaatatgattgcctgctatcgcgaaacgctcgcgaagcaaaggcttgactaccgctttgtcagcaaccaggcgtatccgcgcgaatatcggtatttattaaacgatatcgtgcccgcccgatatgctattgatcccagcaaaccgcccgttcagatcaatagatatcaaatgctgtcacaacactggtcacctgacggtttggtcactcctggccaatggcatcatgacgtcaatatttatattcccaaaaacgctaggggcaccagagcgcttattgccgtcgatcttagcgaaaagatgatggccgaaattgcacaatcaacgaatacgattgttgtttctctggataatattccggctatcggactggagtatcagcacgatggaatttcacgcgttgaggacgacagtattgcgcgcagctggcaattaacgatgcaaagtccgcaaaaccgggcactgctgccactgcatgtgccgatggccgaagctatttcacaaaccatcaggctggctaaaaaagagctgagaccctggcatattgacaaatttattgtcaccggcgcgtccaagcgcggctgggcaacctggcttgccggtatttcagacccgtcggtggaagccattgtgcctttcgtggcggacgcactgaatacgcaagacattgtgaagcacatgtaccgggtctacggcgggaactggcccattgcctttaaaccctattacgacaatcagatcgatctcaagctcggcacgcccgcctttgagcagttgatgaagattgaggatccgttgcagtatctggcgactgacgcgaggtctcgactggcgattcctaaatacatcatcaacgccagcggcgacgacttctttccgccggatgatacgcgctactactttgatccactgcccggtgaaaaatctctgcgtatcgtgcccaacagcgatcatctcgggattgtgaacgtcatgcagcagtcgctggtcgcgtttatcaaccgtttgcaggactcccgtccgctgccaaccgtgaccgtcacaaattcggccaatagcgacgtcgatcgacaggtgagtttctccgagaagccggtgaaggtgctgcaatggaccgccacaaatcctgattcccgagatttccgctacgcctgcggcattcgttacgcgtctacacgccttacgcccagcccgcaaaatacggtgaatctctcgctggactatgccggtgctggctggcaggcgaggtttattgaggccacctttgccgatggctacgtggcaacctcacaggtttatatcactcccgatgcgaaatatcccgttacggctcccctctcggcaggaaaaacctgtcagacactgccgggacgaaattcctgagttttcaattaactcatcatttttcacttttatcagacacatcgtatacaggaacgttttatgacgtatttcatgacaggcttattggtgatgctcgcattggtcgcggtagttgggctgtttaacactatcaagtctcgccagtcgctcaagcgcaattttgcaagctggtatgagtcctatgagaaatcattacggatctcgaaaaacaagatggccaaagagttgattaaacacgccatcgaaatcgctgcgtcacagaacgtgttgaccaatacgcagaaacacaacattttcagagccgtgagcaatgcgggctatggtaaggcgttcaaagcgtgggaacgcaacacgttaaatccgattcgccattcgctgggcggagagacgctgtcaaacatcaacgcggtgaatgcgggcgtggtgatgatcatctttttactgcacaaagaagatgacgacttcaagttggccagcaacaaagcgctggcctttattaatcccacccgccgataaaaatcgggctgccctgcacgggcagcccgagcaggcctagaatgagaccatttttccgggcgacaggcgagtcccaatgcccatcaaggttttggcaatcgggatagccaccggggcaagttgacggcctatcatcaacgagcgatgtttgatggtggtcaacatgttgaagtcattattgagtcgcaaaacgtcatcacggatagccttgcctatcctcaccgtctgcgcaatgccgtgtccactccagccgtgtacggcataaatgggcgcacgttttcccagttttcggcagtcggttgcgccatttagcgttaaatcggtggtaccgctccaggcaaattcgagctcaaggtcatcccggtcaggaaatacggcgcgcaggcgagaggtaaggtaatctacggttttatcgtcatgccagcgcatcccggttccctgaccgccaaacagcaggcgttcgttcctcaccgggcgataatagtctatctggaactgtgtatcgtagaccgctttgccggtaggcagcagagaacgcgtaccgccttcgaccgggcaggtggtgccgacgtaagtatagaaagggattgtcgttgagttgtcctgcgccagcagagtgtaagtggcactgtgcacggcgaggatcacgcctcggcgggcaagaatcgatccctgtggggtgtgtactctcacgcccttgtccgtttcctcgaggcgaatcacctcgctctgctcgtgcacggtacccccgttggtgacaaaaccataaataaggcctcgcgtcagggccagtgaatgaacctgtcctccaagcatgtccagcgcgccaccgtggtagatatcggactgaatatgactcttgatttcgtaagctccgaggatggtcacgttttcgtcaccgagaaacttccttgcatcggcttctctgaccagcgagttgaggtgcccgggatgaacagccgccgttagatggccgcgtccgcgatcgacctcaaggccatagcgtgccgttatctcgtcaatcagcgacatcgactccgacgaggtaaaggtccacaggcggcgtgcttcctcaaagctgagattttccaacattgattctgcctcccaacgcgccagcccgggcgtgagctgtccgccattgcgccccgaggcggcagagccaatcctgtctttttcaagcagtacggtatcaacgcccgattctgaaaggtgaagagcggcagatgcgcccagcagacctcctccaatcactaccagttcacactctttgtcctcgataagcggtgggaagttttcccagggggaaagtgtcgactcgtagtaattagcgggatttccagggtccagattttcggtctgttttttgtcgttgacccagttccagtcaccgtgagttatctcgttctgggtctggatacagattgcgtcatgggttaacgcaggcttcttaatagccgtttttagggacatggcattttctcaataagttaatcacagtccttcaggaagacacgctgaggacaccttcagggaatgactaccggttacacttcggaaagcaccaccaccttgttagtcagtttgcaatagaccagataagctgcacccagcgctgcccacgtcaggcccagctccagcgcgtctttatccaggttgaaccacattacggcgacggtgagtagccccaacagtggcatgacgacgttattgattccctcacgcagcgagttgatctgctttttcagtacggcaaaatgcattaataccgagatattcactgagctaaaggccaccagcgcaccgaagctaatcaatgacacagcggtatcgagattgaagaaaactgcggtcatcgagattccactgacgaatagaatgcagtaaagagggctgtgggtttgcggatggttatagccaaagaatttctgcgggaagatgttgtctcgcccatgatgttgagcagtcgcgcggcgcttgcgtgggaggccaacgcagaggcaaaggtattcaccagaattgccaccagaaataccgactggaagaattttccgccgacgtaaagtacgatttccggcatggcttcgtccggattcttgaactgcgcattgttggggtagtaaagctgaataaaccaggcggcgacgaagaaaatcagtccaccgctcagtgcggtaatgaagatagcgcgggggataaccttgccaggattacgcgtgtcgccagacagggtggtcacggcatcaaagcccaggaacgagaaacagagcatcgccgcgccgcctatcagcggaagaacactggcgttgccgttgagcagtggggctaacgtccagacgtggccgctgcctgcatgatggctcacccctgaatcaccagataaataaagatgcccatcaatatcaccggcaatccgacaaaaataacgttcagattcgccagcagtttgatgttgcggcagttaatgaaggccaccagaagggtaaaagccatgataaacagggcgggggaatgtgcggaaacagcgacctcagataaatccccgagagcagggagttgatcatcggcagcagaatatagtcgagcagagaggaccagcccaccaggaacccaaattggctgccgcaggtgcctcgggcgtaggtataggccgaaccggcctcaggataaagcttgaccaggcgaccatagcttagtgcggtgagcagaaccgccaccagcgccagcaaataggccatcggcacgcgtccttcggtcacgccggagacgatgccgaaggtgtcaaacacggtcattggggtcatataggcgatgccgattatcacaacctgccacagggaaagcccggaacgaagtctagaatcattcatagtggtaatactgcctcatcattgtatgggagattttatataagcaaaacgcatgccaccccaaaaataaaacattccataatcttatgtatatttgacttaaatccttgtccgacgcggatttaaatcgaactcatattttttattaaataaaaaatatgaaattttatagttaaatcattaattagaatgaacaagcggtttctgagactgtgcgcaccaaaagatagcaatgcactataaagatgagattttctgatgtttatggggcgaaggagaggagggcggatgtctttttcttatgattttgaatcagagaataaaacgagaaaacggagggtggacgtcttaaatgacaatgccgccctgaggcggcattgattgcgcttagcctctcaggcttggcaatcagggcgcgaagatgccgtcagccgacttaagattatttgtaatgcttgaggccgctacgcgtaacgctgctatttcatgtgtcatatcacacctctctctatccctgtgattatcagcgtactcaactgactgcacatttcgcaatagtttaaggttgtcaggttgttggaggggttataagggcgggaaaaaagttttacataatgagtaaaagagccatcagcttgcgctgatggctcaataaaaacgacttctatatagttatgggtagaacgtgctgtgtgtaaatattatgcggacaaaattctatacctaataagcactaggtcaagcccgctgaagaaatttcacacagccttccgaacctctgccacacactaattagggtggctagcataactcatgacgtttttttattttcggccgagcagataaccgatgagaatacctaccgcgcctgcaactgcaacgcctgcgaaaggattttctttaacctgatcgacggcagtcgatactgcatctttagccacatagctagcttgagaggcatatttacgtgctgcgcctttggcctgatgctcgggtgaatcagtgagatcgccgtaagcttcctgtgcagcgcccgcaacttcttttactttgtcttgtgcttgattaaacatacgctatctccttttgattggttagataaggttagcagagaaaaccagaattgttatcctctgccacaaaatacgcgtgttatcagacacatcttataaaccacgtcctgccagggtagtgcatgcatcgccgttggctggcggtggggtggtagggtatttatcgtcaggcgtaatataaacctgcgaggtggcgatatagccgtcgctaaacgtcgcctccacaaaggtggcctgccaacccgggcctggatagctcagcggcacggagacattatttccaccgttcatggtaatgtcgctagcaatatatttgatgccgcatgcaaagcggaaatcacgtgccgcaggattagtggcggtccaacgtaataccttcagcggtttttcggaaaatgtgatattcaggctgttacttttattttgacggtagggagcaatggctagcgttggcaatgctttgttgttttgaattcgattgataaacggcaccagtgatttttcgaaatcatcctgaatgccgatgtggccggtatttggcgcaatacgtaatgatttggttcccggcagcttgtcgtaataatatcttgtattatcaggaacaaagaaatcatcaccgctggcgttaacgatatactttggaatagccaggcgtgattcggaggggtatccatatattgcaatggatcctctattttcatcaatttgataaagttcgaggaattaaccagcttatcgatgccttggttataatagggtgtaaaagccacaggccagtttccaccgtacgagcgatagatattcttcatcaccgaatcggtgtccagtacgtcaatgacaaagggaacgattgccaccacgctgggatctgaaacggcacttagccaggttgcccagccgcgtttcgacgcaccggtcacgatgaactgatcaatattccagcgcaccaattccttttttgctagccttattgtttgggatattgtggccgccatcgggacatgcaatggcagaagttggcgctgcgccgggtcttcggtgaataatttccaggtgcgtgcaatgctgtcatcctcgacgcgcactttgttgtcgttctgatacaccagattattgttcgggatcgtcttgagcgaaatgacgatagtgtttgtctcctgcaccacctttaacagggttccctcgtccatatcgacggcgataagcgcacgggttgatttagggtgtttgggaataccaatcgccacattttcaagccactgtgaaggcgaaaccagattttcaggagaccaggactgagaaatcatctgatagcggttaacttcgacatcgccatatacctgattgctcaaaaaccaatatttaagcggctgcgatgccagcgtttggcgatagcaggaaataaccgctgaaggatcattagccttcatatctttacacgcattatcaggagtatttgtagctgcaaaaatttcactggttaaaaaaagtaaggaagaaatcaaatagtgaatctttttcatcattcatcctcaatataatgaatggcaggtttcatcttcgaattaacaataaatgctattgttactgtgggtgattttctcactccttgactattacttatattctaactgatttttaatcattctttgtcagcgtccttaaaatcagattattgctacacaaatgctgttaaattaaaaaagatatgggttattttctgatttctaaagaaataacactcagtgaaattgttcgaattatttgaattctaagaggctattttagcgttaatttttgattttgtttgaatgactcaaaaatattaatgacagaaagggcaactgtaaaatttaagtgtgcacaatttacgcggttaacacattgatgtgcaatgttttaaatctaaccgagaggttttatcatcgtgcataacgagaggaagagtttggtgataaacccgccccggagacgttagggggcggggtaaagattaaggcttgttggcaattaacagcgcgcggcgtggggcagggtagccttcaacggtcttgctgctgtcattagggtcgaggaactctgccagagattcgctggtcatccacggggttcgatgctgttcttccaccgtagtcaggctaacatcggcaatgcgcacattgatgaagccgcatttgatgagccatccttttagcgcctcggcggaaggaatgaagtagatattattcatctgcgcatagcggtcgcccgggaccagcacttgattgctgtcaccttcgataacaatcgtttcaagcactaactcaccgccgctaaccagctgatttttaagctgtagaaggtggtcgagcggggagcggcgatggtaaagcacgcccatcgagaacagagtgtcaaaggcgttcagttccggagctgctcaatgcccaacggcaacaggtgagcgcgctgacagccgcccaacagcttgcgaacggcctcaaactggcataaaaacagctgcattgggtcgattccgaccacaaaattcgcgcctgcgccaagcatgcgccacatgtggtaaccgctgccgcagccgacgtcgaggacggtacgacccgccaacgaagaaatgtgcggcagtacgcggtcccacttccagtcagaacgccattctgtttctatttcaatgtcatacagtgagaatggacccttgcgccacggcatgaggttacgcagtaggttttccatgccttcgcgctgacccttcggcagcggctcaagcatattggccgtcacgctgtgcagcagatccaggcgttcgggttgcagcaacggcaacctgtctacggcgttgaaccacattttgaacttaccgtgcagcgactctttctgccaggccgtcagctgtgaaggcagagtattgagccacgggcttagcggacccttggcgatagcctgataaaaatccccaaattcaatcacgccgcgtcccctgctgtctcatctgccttgatggcaatcagtgagccaaagttgaagcactggaaccagacctcggcgtgttcaaaaccggcctgttgcaggcgtgccttgtgggtctcaaccgaatcagtcagcatcacgttttcgagcatgctgcgtttctggctgatttccagctcgctgtagccgttggcacgcttaaagtcgtgatgcatgttgaacagcagttcgccgacgttgacatcttcaaagctaaatttctccgacaagaccagcgcggcccccggacgcatgccctgataaacctgatttaacaggcgctggcgatcgtcgggctgcaagaattgcagggtaaagttgagcaccaccatcgaggcatttttcagctcgacgtcaagaatatcggcttcgataacctgcaccggcgtctcggcgcggaaggcgtcgatgtggcggcggcagcgctcgaccatggccggagagttgtcgacggcgatgatttcacacccagagacgtgaatattacggcgcattgaaagcgtcgctgcacccagagagcagcccagatcgtagacgttgctgtcgggtttcacgaagcgttcggccagcatgccaatcatcgaaatgatgttggagtagccaggtaccgagcgttggatcatatcggggaagacttcggctacgcgctcgtcaaaagtccagtcgccgagtttctcaatcggtgcagaaaaaagtttatcttggttagtcatagtgctgaatcagaccaaaaaaagtaaaaaggggagcaaaaatcgtcggtttgctgctatgggggcggagtttagcagattccgcccgctggatactcgaaaaatatcagcctaagcaccgcgtgccgggtcccggttgttaaaacagcgagttttgctcgggccaatcgggctcaggcggcagcgccggaagatggcctctcagcgttcgccaaaggacctgtgcctgctgcggagcatcgctgcagtcgggagagtgaataaacaggtaaggggaatgcccctgttgctgccagtcgaccagcttttttatccactgcgagaaccatttttgattgacgttaatgtcgtcccctccgacgaagcgcactatcggatgcgtggcagtgaccacggcgtgcaccggcagcatcggtttctttcttttcgcctcaagcaccgcgtgagtggtgctggtggcgtgatgcaccggacggctgtcgagcaaggtccggttgatgccacgttcatgaagaccgcgattcaatgcgcgctcttcctcacctttctcaaaaaactgtgagtgcctgacttctacgccgtaatcaaagccggtaggcaaggcatcaagaaactgccacaggcggtcgagatgctgaggtgagaaagtggagggtaactgtaaccacagttggccgatgcggttccccagcggcgcgatgcactgatagaaggcatcgatttcccgctgacagttttgcagcgcggccttgtggctaatggtttggggaaatttgaaacagaaacggaaatcatcatgggtcatgtcgcgccagcgcataacaacctcggcattgggcaatgcgtaaaatgtcgtattgccttccacgcagttgaagtaacgggcgtaatcggccaaatcgtgcaggccgatgctgttccatgcactgtggtgccattggggaagtccaatatacatgccgtttccctattgttgttccgtttctaaaatgaaaaacgccgcccataggcggcgttggctgatatcggcagggtaaccttactcggcgatggcagcaagtacctcgtcagtggagcgaacgcgaccgatgcgagggaaaatgaagttgatgcttgaaccgtggtggtcagcattgtgtgcgctgcatgcgtcttcagcgaacaccagttcgaagcccagctcccacgcattacgcgcggtggactccacgccgatgttggtagagatgccgcaaagaacgacggttttaataccacgacggcgcagttgcagctcgaggtcggtaccgtagaacgcgccccattggcgttttactaccagcaggtctttatcggtaacgttaagttgctctgggaattcccaccagtcttcaggcaggctacccccaccggcagagatgtcggtaggttgtttcagcgcttcgtcgaaggttgcagaccagcctacgcgaaccataaataccggcgcgccaagtttgttgaagcgggttttcagttcagttgctttatccaggacttgctgagcggtatgtggccccccggcaaaaggcagaatacctttctgcaagtcgatcagcaccagagcagttgttttaggatcaagtgttagagacataataggtaggctcgcgattttataagtttaaataacccacggtcgttgcgcagcctccgtgcgacggcaattacttagggcactaatagtccgtaagagtctaatccaggttagggtagggtttgttgataattttgttaaattatatgtgagggcgcgccaaagcgaatttcaggtgcatcaactgcgtgttcgcacttatcctgcgaacgaaattcctttataatgaccgccttttttcgacccatattaatccgatgctcacaggcagtgagatcaaagggataccgttatgcgtactgaatattgtggcaagctgaattcgtccaacgttggtcaggaagtgactttgtgcggttggattaaccgccgccgcgacctgggtggtttgatcttcatcgatttgcgcgaccgtgaaggcatcgtgcaggtatttttcgatccggatcagagcgcagcgtacgaattggcgtcagaactgcgtaatgagttttgcgtgcagttaaccggtaccgttcgtgcgcgtcctgaaagccagtttaataaagacatggcaacgggtgaagttgaagtctttgccagcgcgctgaacatcatcaaccgttcagaaccgctgccgctggattccaaccacaacaacaccgaagaagcgcgtctgaaataccgctatctggacctgcgtcgccctgagatggccaaccgcctgaaaactcgcgcacgcatcaccagctttgtacgccgtttcatggacacccatgacttcctcgacatcgaaacgccgatgctgaccaaggccacgccggaaggcgcgcgcgactatctggtgccaagccgcgtacataaaggtaagttctacgcattgccacagtccccacagctgttcaagcagctgttgatgatgtctggctttgaccgttattaccaaatcgttaaatgtttccgtgacgaagacctgcgtgccgaccgtcagcctgaattcactcagattgacgttgaaacctctttcatgaccgcagagcaggttcgcgaagtcatggagaagctggcgcgcgagctgtggctggaggttaaaggcgtcgatctgggtgatttcccgatcatgacctacgccgatgctatgcgtcgtttcggctccgacaagcctgatttgcgtaacccgatggagctggtcgacgttgctgacctgttcaagtccgtcgagtttaaagtgttctccgatccggctaacgacccgaaaggtcgcgttgccgcgctgcgcgtgccgggtgctgcccagctgagccgtaagcagatcgacgaatacgccaagtttatcgaaatttacggcgccaagggtctggcttacattaaagtcaacgaagtggctaaaggcctcgaaggtatccagagcccggttgccaagttcctgaacgaagaactgctgagtgcgctgatagagcgtaccggtgcacaggatggcgatatgattttcttcggcgccgccagtgccaagattgtcaccgatgccattggtgcactgcgtctgaaactgggtcgcgacctgaaaatcaccaacgaaagcgcctgggcgccgctgtgggtggttgacttcccaatgttcgaagacaccgacgaaggcggactttcggccatgcatcacccgttcaccgcaccgaaagaaatgacggcggaacagctgatcgcgaacccaacctccgctatcgccaacgcctacgacatggttatcaacggctatgaagtgggtggcggttccgtacgtatccaccgtggtgagatgcagcaggcggtattcagcattctgggtattaccgaacacgagcagcgcgagaagtttggcttcctgcttgatgcgctgaaatacggcacgcctccgcatgcgggtctggcgtttggtcttgaccgtctggtcatgctgctgaccggcaccgataacatccgtgacgttatcgcgttcccgaaaaccacggcggcagcctgtctgatgaccgaagcacctaacttcgccaatccggcgtctctggttgagctagggattagcgttatcgctaaaaaagcgaccccagacacagattcagagaataactgatgagctacaagcgtcctgagtcgatactggtggtcatctatgccagaaacaacggccgggtgctgatgctccagcggcgtgacgatacggagttctggcagtcggttaccggcagcctggaagacggcgagtcacccgcgcaaactgcgcagcgtgaggttctggaggaggttggcatcgatatcgctgccgaaaatctgctgttacaggactgcggccgctgtgtcgagtttgaactgtttgcgcacctgcgctatcgctatgcccctggcgtgagctggaacaaagagcactggttctgtctggcattgccggaagagcgaagcattgttctgaccgaacaccacgcctatcgttggctggacaaagcggctgcggccgctttgaccaagtcaccgagcaatcagcaggcgattgaagaatttgttatttattaggccggtctcagagtcattgagtctcggagcaaggccgttgattatctaaaatgagttcagcctgtataaggctaatggagatcttttatggcaggtcacagtaagtgggccaacaccaaacaccgcaaagcagcacaagactctaaacgcggtaaaattttcaccaaaatcattcgcgagctggttaccgctgcgaaactgggcggcggcgatccgggtgccaatccacgtctgcgtgcggccatcgacaaggcgctgtcaaacaacatgacgcgcgataccctgaaccgcgccatcgcgcgcggcgtgggcggcgatgacgacaccaacatggaaaccatcatctatgaaggctacggcccgggcggcaccgccgtgatggttgaatgtctgagtgataaccgtaaccgtaccgttgctgaagtgcgtcatgctttcagcaaaaccgggggtaacctggggaccgacggctccgtcgcttacctgttcaccaaaaccggcgtaatcacctttgctccaggccaggacgaagacgttatcatggaagccgcgctcgaagcgggtgctgatgacatccagacctatgacgacggcgcaattgacgtttacaccgcatgggaaagcctgggcgatgtaaaagacgcgttgcaggccgctggcttcgtggccgatcaggctgaagtcaccatgatcccttctaccaaggccgatatggacgccgagaccgcgcctaagctgctgcgtctgattgacatgctggaagactgtgatgatgtgcaggaggtttaccacaacggtgaaatctccgacgagatcgcagaaaccctgtaatcttcctcacgggcgaaggcgcgacaggctcgcgttttcgcccggctttacggacatcctcagtccggtttgttttttccttcaattcaagacaaacttgccaacagaacatttcatacgccaaccggtcctctgcccggacaggctcagcgttatcataagataaggtattaataagcgatggctatcattctggggattgaccccggttcacgcgtcacaggctatggcattatccgccagcagggcaggctgctcagctatttgggcagcggctgcattcgcacggtggtcgatgacatgccggggcgtttgaagctgatttatgcgggcgttaccgaaattatcacccagtttcagccggacttttttgccattgaatcggtgtttatggccaagaatgccgactcggcgctcaagctgggtcaggcgcgcggcgcggcgatagtggcggcggttaatcaggatttgccggtatttgaatatgcggcgcgacaggtcaagcagaccgtcgtcggtaccggtgcggcggaaaagagtcaggtgcagcacatggtgcgttccttgctcaagctgcctgccaatcctcagtcggacgccgccgatgcgctggctattgccataactcattgtcacgtcagccaaaatgcgattcgcttaagcagcgacaggctccagttggcgcgggggagaatgcgttaattaaggctggatatctatccagctcttttctatgatataaaccataaaaattttcgtcattccgctggccttgctggcggattcatcggcaaaggaaggtaaaagtgataggtcgtctcagaggcattattctggaaaaacagcccccgttagtgctgttggaaaccaacggcgtgggttatgaagtgcacatgccgatgacctgtttttacgaactgccggagctggggcaagaagcggtggtcttcacccagtttatcgtgcgtgaagatgcgcagctgctttacggcttcaatgataaacaggaacgtgcgctgttccgcgagcttattaaggtcaacggcgtagggccgaagctggcgctggctattctctctggcatgtctgcgcagcagtttgtgagtgcggtagagaaagaagaaatcacctcgcttatcaagctgcctggcgtgggcaagaagaccgccgaacgtctggtggttgaaatgaaggaccgctttaaagggctcaacggcgacctgtttaacaatccggtcgatattaacctgcctgctgctgcgtcgaaggcgaaagagtctgacgccgaaggcgaagcggttgccgcactcatttctctcggctataagccgccagaggcgagccgaatgatcagtaaagtggccaaacccggcgcagagtgcgagacattgattagagaagcgcttcgcgcggctctgtgaggtaacagatgatagaagctgaccgtcttatttctgctggtgttatcagcgaagaagaagttatcgacagagcgattcgtcctaaactgttgtccgaatacgttgggcagccgcacgttcgttcgcagatggagatcttcattcaggcggccaaacagcgcggcgacgcgctggatcacctgctgattttcggtcctcccggactgggtaaaactacgctggccaacattgttgctaacgagatgggcgtgaacctgcgtaccacgtcgggtccggtgttggaaaaggcgggtgacctcgcggcgatgctgaccaacctcgaacctcacgacgtgctgtttatcgatgaaattcaccgtctttcaccggtagttgaagaggtgctgtatccggcaatggaagactatcagctggatatcatgattggtgaaggcccggctgcgcgctctatcaaactcgatctgccgccgttcacgctgatcggtgcgacgacgcgggcggggtcattgacctctccactgcgcgaccgttttggtatcgtgcaacgcctggagttttaccaggttgccgatttgcagcacattgtggggcgcagcgcgtcttgtctggggcttgagctgtcggaggagggcgcgcatcaaatcgctcgccgttcacgcggtacgccgcgtatcgccaaccgactgctgcgccgtgtgcgtgacttcgccgaggtcaaaggcgacggcaccatcaacggtgacgttgccaacggcgcactggacatgcttgacgtcgacgccgagggctttgattacatggaccgtaagctgttgctggcaattatcgacaaatttaccggcggcccggttggactggacaacctcgcggcggcgattggcgaagagcgcgaaaccattgaagacgtcattgaacccttcctcattcagcagggattcattcaacgcacaccgcgtgggcgtatggcgacccatcatgcttaccggcattttgggatgacccggcctgagtaaaaggtttttttggctggtggcccgcggcgctgtttgtggagattgtctttaaggccaacgtcaatctacgccgagtcgcttttatggcttatcggcttcgataggccaccgcagcgaacctgggcaagaggggaagtcagtacctcttgcctctctgcgccttttttccattttgttcctcccgtccccgctgtactcccctaaaaagatcaaatttgaaattaaaactcaattccaatggtataatgccgcccctctgacaaaataatgataactccagtcaaaagttctcttttgctctcagctatttgccgacaggcaggctgcgggcgcagtattctagactgctgcaatacctaaatgcttagtctgaaaacaggcttaagaacgataaaaacgataagcctattgtgaaacagaaaaaatgatcaaaatgaaaaaatccttcttgatccgcgccgtgatggccgcatcattattgaccgcaagcgtggtcaccaccgctcaggcggcagtattggcgtctttgcgcccgctcggttttatcgccgccgctattgccgatggcgttacgccaacggatgtcctgctgccggacggtcagtctccccacggctattctttgcatccctccgacctgcaacgcatgcgtagcgccgatctgctggtgtgggtagggccggacatggaaagctttatgagcaaatcggtggcgcaattaccgcctaatcgcgtcgtcgacctctcggcaatcccggaagtgaaacccctacttatggcggcggataaccaagaacagcgtgaacatgacattcgtgcgcataataaaatcgccgacgatcagcaaactgccgtctacgacatgtcggtgtggctttccccggatattgcgaaactgaccgctatcgcaattcacgcaaaattattggaactaatgccgcaaaagaaggaccaattagatgccaacttgcgccagtttgaagccggattgacaaaaactgacataaagcttggtaagatgctgcaacctgttcagggaaagggatattttgtttttcaggatacattcagttattttgaaaaacactacgggttgtcgccgatggggcgcctctctgtgaatcctgaaatcccgcctggagtacagcgattacatcaaattcgaacacagctggttgagcagaaagcggtctgcgtttttgctgaaccacagttcaggccggccataattaatgccgttgcccagggaacaacagtgcgtacgagcacattggatccgctgggaggcggtatcgcactgaccaaggacagctatgtgaacttcctgtcacatctgacttctcagtacgtgagctgcctgaagtaagctataaggatccatttaagtgcagctactaccccgatcgatcgctctggcgctcaacagtcttccacgaccccaccgtatcatgctggggtcactgaccgcgctaactctggccatggcgatatcaaaacccttagtatatcataatgatgacgacggttatcaccaaaagcctattgccaaacaaatccttctcgacgcgcaacaggtgcgttccctgttgcctgaggcgagcgaacctctcgacgacagtgactcgccacccgccgcggatatccctaaagatgaactcgatgataaaaccgagaacgaaaagggcgttcacgagtatgtggtctctaccggcgatacgctcagcagcattctgaatcagtacggtatcgacatgtctgatatctccgcgctggcaacctcaaacagtgacctgcgtaatctgaagataggccagcagctgtcctggacggttaacgacgacggtgatttacagcgtctgacctgggaaaagtcgcgccgtgagacggtgacctttgaccgcagcggcaacggcttcaaggcctcaaccgaaatgttgaaaggcgaatggcaagaccaggtgctcaaaggcaccgtcggcggcagtttcgtcggcagcgctaaggaagctggtctctctaatgccgaaatcggcgcggtggtcaaagccctacagtggcagatggacttcaaaaaattgcgtaaaggcgatcagttctcggtgttgatgtcgcgcgaaatgctcgacggcaagagccagcagagcgaactcgccggcgtccatatgcgcagcggcggtaaagattactatgccattcgcgccgaagacggaaagttctatgaccgttcgggcagcgggctggcgcgtggttttctgcgtttcccaaccctcagacagtaccgcgtttcctccaacttcaacccacgtcgccttaatccggtcaccggccgtattgcgccacaccgcggcgtcgattttgcggtgcctatcggtacgccggtactggccgtcggtgacggtgaggtgatcgtcgccaagaacggcggcgcggcgggtaactacgttgcgcttcgtcaggggcgtcagtatatgacccgctatatgcatctcagccgggtgctggttaagccgggacaaaaagtgaagcgtggtcaacgtattggactgtcagggaataccgggcgttcaaccgggccgcatttgcactttgaagtgtggatcaacaacgtcgccgtcaatccgctgaccgccaagctgccgcgctccgaaggcctcagcggcaaggacctgaaagactatctgtctacggtgcgtgaagtgatgccgcagctgaaactctgaggtgtcccatagacgcaacgaataaaatctcttcgttttcttctggttgaatagcgtcgtctgccgttgcgggcgacactattcattgcaaaataattcactgcacctatcattggacgattgaattttataattagtataaaagtttatgagttaacgcatgcaatcagaaaaaaaatcgaacgttgagtttatcccgcagttccaaaaagccttttatcatccgcgttactggggcatttggttgggcgttggcgcaatggcggcaatggcttacgttccggcaccgattcgtgacccgattttgggcggactcggtcgtctggcaggaaagttcgcgaaaggggcccgtcgccgtgcgcgcatcaacctgctttactgcctgcctgaattgcccgaagcacgccgtgaagagataattgacgacatgtttgccgctgcgccgcagtcgatggtgatgatggccgaactggcctgccgtggcgatgcgaaaaagctgcttggacgcgttcactggcacaatcaggagatagttgatggcctgaaagcagaagggaagaacatcatctttctggtgcctcacggttgggcggtggatattcctgccatgctgatggcggcgaccggtcagccgatggcggcgatgttccataaccagaagaacctgctgagtgactatctgtggaataccgtacgacgtcgttttggcggccgtatgcatgcgcgcaatgacgggataaaaccgtttatcagctcggttcgtcagggatactggggctattatctgccggatcaggaccacggcgcggaacacagcgagtttgtcgatttctttgcaacctataaggctacgcttccggcggtcggtaggctgatgaaagtgtgccgcgctgaaatcgtgccgcttttcccggtgtatgatggcaaaaaacatcgtcttgatatccatatccgcccgccgatgtacgacttggcaacggctgatgatgctaccatcgcgcgtcgtatgaacgaagaggtcgaggtattggttgggcctaatcccgagcagtacacctggatccttaaactgcttaaaacccgcaagccgggcgagcaggagccgtacacccgtgacgaactttacccacgctaaggggtaaggcacaaaaaaccggccaaggccggttttttacgttctactctaagtgccaccgcggggtgtcacgattcagtcaacggcttattcaaccgtcagaacgcgcgtggtgttggtcgtgccggtggtgctcatcacgtcaccctgggtcacgatgacgatgtcaccggacagcaggtagcctttgtcacgcagcagattaaccgcgtcgacagccgcggcgacgccgtcgttgttgctgtcaaagaataccggcgtcacgccgcgataaagcgccgtgagattcagggtatgttcgtggcgagacatcgcgaagataggcaggccagagctgatacgcgacatgatgagcggcgttctgcctgactccgtgagtgagatgatcgcgctgacgcccttgaggtggttggccgcatacattgaggacatagcaatggtttcttcaatgttgtcgaactcgacgtcaagacggtgcttcgaaacgttaatgctagggattttttcagcgccaagacaaacgcgtgccatcgccgccacggtttctgccgggtattgacccgccgccgtttctgctgacaacatcaccgcgtcggtaccgtcgagcacggcgttagcgacgtccataacttccgctcgggtcggcatcgggttggtaatcatcgactccatcatctgggtcgcggttatcacggcgcggttcaacgtacgagcgcggcggataagcttcttctgaatgcccaccagctcaggatcgccaatctcgacgcctaaatctccacgcgccaccatgaccacgtcagaggcgagaataatgtcatccattgccgcatcgctggcaaccgcttctgcacgctcaaccttcgagacgattttcgcatggcagcctgcatcgcgcgccagtcggcgtgcatagttcaggtcttcaccggtgcgtgggaaagagacggcaaggaagtcgacgccaatttttgccgcagtcagaatatcggctttgtctttttcggtcagcgcttcagccgaaagtccaccgcccagtttgttgatgcctttattgttcgacagcggaccgccaacggtaacttcggtgaacactttcgcgtcctgaacttcgagaaccttgagctgcacacgtccgtcgtcgagcagcaggatatcgccggggaccacgtcggcaggcaggcctttgtagtcaatcccaacgcgctccttgtcgccttcgcccttactcatgttggcatcgagcaggaacttatcgccgatattcaggaaaaccttgccttccctaaaggtggaaacgcgaatttttgggccctggagatcgccgaggatagccacgtgacgaccgagtttagccgcaatttcgcgaactttatcggcgcgaagctggtgatcttccggggtgccgtgagagaagttaaggcggacgacgtttgcaccggcggcaataattttttcaagattattatcgcggtccgttgccgggccgagggtggtgacaattttggttcttctgagccgtctggacatgcattactccgttgacttgtgaagcatttgcgctgctaaacctgaataacgtgttacgggataacaacataagggaggttgattgtaattttaatacaaaattgttgcacccatgagagagaaggcgcgtggcctgctcgacactcgttgttatcccaataaatgttatccgggcaattttgtctggctcttgtcggagaggattgaaagcccactcctgacggccagacccctagtatttaacaacattgtaacaaacgtgacggcataaaaacatccgtcaatttacggatttattcaaatcgtggggggcagaaacccctttatcaaaacgcgaatcgcgtaatgattctttgactcgcttcaggttatctctgaatttagccccgcgacgcaaagtaaatcctgtcgccagcacgtctatcagcgtgagctgcgccaaacgcgagaccatcggcatataaacgtcggtgtcttcaggaacgtcgagcagcagggaaagggtcgcttcatgagccagcggtgtgtctttggaggtgatagcaatgaccgttgcgtcattttcgcgggcaagatgcgccagctcgactaagtttttcgtgcggccggtgtgagaaatcaacaccacgacgtcaccttcgcccgaattcatacagctcatgcgttgcattacgatatcatcgaaatagataacagggatgttaaagcggaaaaacttgttcatagcgtcgtgtgcaacggctgctgacgcaccaagtccgaagaacgagatcttcttcgcctgggtcaggagatcgacagcgcggttaactgctgaaatatcaagcgtatttttcacctgctcgagactggccatcgtcgattcaaagattttcgcgctataagcctcaacgctgtcagtttcttcgacgttgcggtttacgtatggcgttccattagccagactttgggcaagctgtaatttgaagtcaggaaaacccttggtttcaaggcggcggcagaagcgattgacggtaggttcactgacgtccgccattttggctaatgtcgcgatgctggaatgtatggcagtttgtggtgaggcaaggataacttcagcaacttttctttcagatttgctgaggatgtccaaaaagctgaggattttttccagcgtattcatgggcggctactcaataggtttcatcgatttcaacgaaaaggagaaatcatgtcagtttgatgaaaatatactacggcgctgaatgaggtggcagggacaatctggtgaaatccaagctttttttccagaacatgagccagatctaagtttcaatatggtaattaatgctcaaatttgtcataaaattacatcagggttagcgtaaagcttagccgatttaacaatcatgacaaattatgtggttttttattcatttattaatgccttagatcttggtttactgactctgcctaatcagagtacattgtggcggaaacgcaaaacctgctgaaataaaattacaatctacctaaacgtttgagatgcaaacgcttcggcgctgcatttccaggcaaaaagggtaaatcctgctctaaggagaagaacatggcggtaaaccaaccagcccaggcgtgtgacctggttattttcggtgctaaaggcgatcttgcacgccgtaagctgttgccttccctgtatcagctggaaaaagctggacacattcacgacgacaccaagatcatcggcgtaggtcgcgccgagtgggacaaagcggcttataccgaagtggtaaaagaagcgctaaccacctttatgaaagaaaagctggatcctgaactgtgggaaaaactcagcgcccgtctggaattctgtaatctggacgttaacgacatcaagcacttcacccgcctgggcaagatgctggatacgtcaaaacgtaccaccatcaactatttcgccatgccgccgagcaccttctcagctatctgtaaaggtctgggcgaagcgggtctgaataaagagccagcccgcgttgtcatggaaaagccgctcggtaccgacctggcgtcttctcaggaaatcaacgacggtgtggcgcagtacttcaatgaaagccaggtttatcgtatcgaccattacctgggtaaagaaaccgtattgaacctgctggcgctgcgctttgccaacaacctgtttgcctccaactgggacaatcgcactatcgatcacgtgcagattaccgtggccgaggaagtgggcatcgaaggacgttggggttacttcgacaaagccggtcagatgcgtgacatgattcagaaccacctgttgcagattctgaccatgatcgcgatgtctccaccggcggatctgagcaccgaccgtatccgtgacgaaaaagtgaaagtgctgcgttctctgcgtcgtattgaccagaccaacgtgcgcgaaaccaccgttcgtggtcagtacacggcgggattcgtgcagggcaaaaaagttcctggttaccttgaagaagaaggcgcgaacaagagcagcagcaccgagagcttcgtggccattcgcgtggacatcgacaactggcagtgggcgggtgtgcctttctacctgcgtaccggtaagcgtctgccaaccaaatgttccgaagttgtcgtttacttcaagaccccagccctgaacctgttcagtgattcataccagcaactgccgcagaacaagctgaccattcgtctacagccggatgaagggatcgaaatcgaagttctgaacaaagttcctggtcttgagcacaagcaccgtctgcaaacgactaagcttgatctcagcttctctgagaccttccacgaagaacacattgccgatgcctacgagcgtctgctgctggaaaccatgcgcggtattcaggcactgttcgttcgtcgtgacgaagtggaagaagcctggaaatgggttgatggcatcatcaacgcctgggccgcagaaaacgaagcacctaagccttatcaggcgggtacctggggacctgttgcctcggtggcgatgattacccgtgatggccgttcatggaatgagttcggctaatccaccgtagtttcacggcacgtcaggtaaggggcaacagatggccaatttcgtcgaattttccggtgcagcggcgctcaaccaaaatctggccggtaaaatggctgacgcattgcgccgcgccattgcggaccgaggacaggcaacgctgattgtttcggggggcagaacgccgctcgaacttttcaggcagctgtctcgccaggagctcgactggagtcgcgtgaccattaccttggccgatgaacgttgggttaccaacgacaacggctccagcaacgagaaaatggtgcgaaacagtttgttgcagggtgaggtggcgaaagccacctttattgccctcaagaacggtgccgggactgccgccgagggtgaatcgacggctgagtcggcgctggcggcactgcaactgcctgcggacatcacgctgctgggcatggggacgacggacatatcgcgtctctgtttcccggcagtgtcaatcttgccagggcgcttgacctcaagacgacgcggcgctgcgtagcgattacgccgctgaccgcgccacttgagcgcatgacgctgacgttgccggtactgctcaacagtcggcgaatctatttactgttggccggtgaatccaaacgcgaagtttacgagcgtgcggagaaaggcaccgatcaaaacaacatgcccgtcagggcagtattgcatcaacaacagactccggtagaggtttactggaccgcttagcgggatgaatggagacaaagatgaagaactggaaaacaagcgcagaacagatcctgacctcgggtccggtcgttccggtcattgtgattaacaaactggaacatgccgttcccttggccaaagcgctggtggcgggcggtgttcgcgtgcttgaggtgacgctgcgcactgcctgtgcgattgatgccatcaaggcaatcgctcatgaggtgccggacgccattatcggtgcaggaacggtgcttaatgcgcaacagctggcggaagtgaccgcggcgggcgcgcagtttgctatcagcccgggcctgaccgagccgctgctaaaggcggccaatgagggtccaataccgcttatcccagggattagcaccgtgtcggagctgatgctgggactggatgccggtctgcgcgaattcaagttcttccctgcggaggctaacggcggtgtcaaggcgctacaagccatcgcggggcctttcccacaggtgcgtttctgcccaactggcggtatcactccgggcaactaccgtgactatctggcgctgaaaagcgtgctttgtatcggcggttcctggttggtgcctgcggatgcgctagagcaaggtgattatgcccgtatcaccgagctggcgcgtgaagcggtggcgggcgcgaaagcctgattgttgatgtaaaggtaaagaaaaagcctcctgatttgcgtcaggaggctttttttatggcctatccagccgagacttaaagcgcggcgataaccttgatttcaaccttgtacttcgggttcatcagtttagcttgcacagtgcagcgaaccggcgcattgcccggtgaaacccaggcgtcccaggcttcgttcatcgcggcaaagtcatcgccgtcaaccaggaagatggtcgcatccagaattttgcttttgtctgaaccgacttccaaaagcgccgcatcgataatcgccaacgtttcggcggtctgatctttggcgttggcgtcgaggttttccggaacgctggtgtaataaacggtgccattgtggacaacgatatccgacatccgtggctcgggtctaatgcgttgaattgacataaagagtgctcctgaaagtcgctgttttaatgataggcaacagggtaacacatcgtgagccgacaatggaccgacagatggtggtggtacgcggcggcaaggattggcataatcagcgctgattcaattaatgtgggtttagcgtgatagacgatttcgcaacagacggcgcactggcgcaaaaaattgagggcttcaaaccccgtgaaccccagcgtctgatggcgaatgcggtggctctggcaattaaaaataagcagggattggtggtagaagccggaaccggaaccggtaaaacctatgcttatctggccccggcgttacgctctggcaaaaaagtcattatctcaaccggctccaaggcgttacaggaccagctctattcccgtgacctgcccaaggtagccaacgcgctaaaattcaaaggcaagctggcgctgctgaaagggcgctccaactacctgtgcctcgaacgcctcgatcaacaatcgatggcgggcggtgaactggccagccagtcgctcagtgacctcgcgcatctgcgcagctggtcggccaaaaccgaagagggtgatattagcacctgcaacgtcgtcgctgaagacagctacgtttggccgctggtcaccagcaccaatgacaactgtctcggcagtgattgtccgatgtacaaagagtgctttgtggtcaaggcgcgccgtaaggcgatggacgcagacgtggtggtagtcaaccatcacctcttcatggccgatatggtggtcaaggagagcggcttcggcgagcttattccgaccgccgatgtcatgattttcgacgaagcgcaccaaatccccgacattgctagccaatattttgggcagcagctttcgagccgccaattgctcgatctgtcgaaagatatcaccatcgcctatcgcaccgaggtgcgtgattcagcgcagctgcaaaaaagcgctgaccgcctgagccagagtgcgcaggattttcgtctggcgcttggcgaacccggttttcgcggcaatttgcgcgacgtattggccgacaccaacatccagcgcgcgctgctgctgctcgacgacgctctcgagctttgctacgacgttatgaagctttcactggggcgttcggcgctgcttgatgccgccttcgagcgcgccacgctgtaccgcaaccgcctgaagcgcttaaaagaggtgagcgttccaggctacagctattggtatgagtgtaactcacgtcatttcgtgttggcactgacgccgctgtcggtgaccgataagtttcgtgaattgatggacgataaacctggggcatgggtctttacctcggccacgctgtcggttaacgaaaagctcgagcactttacccagcggctagggctggacggcgcgcaaacgctgctgctggcgagtccgttcgactacgccaatcaggcgctgctctgcgtgccacgctatctgccttcacccaacgagcgcggcggttcgcgccagctggctcggatgctgcgcccgcttatcgaggctaaccaggggcgctgcttcttcctctgtacctcacaccagatgatgcgcgagctggctgaagaatttcgtgccagcatgacgctgccggtgctggtccagggtgagaccagcaaaggtcagctgctggcgcagtttgtcgaggcgggcaatgccctcttggtggcgaccagcagcttctgggaaggagtagacgtacgcggtgaaacgctgtcattggttatcatcgacaagctgccgtttacctcaccagacgatccgctgctcaaagcgcggattgaagactgccgcctgcgcggcggtgatcccttcaacgaggtgcaactgcctgatgcggtcatcacgctcaagcagggagtgggcggcttatccgcgataccgatgatcgaggcgtaatggtcatttgcgacaaccgactggtcatgcgaccttacggcgaagtgtttctcaacagtctgccgccaacgccgcgtacgcgttccatcagtgaagcgatggcgttcttgcagaaaagttaacatttcagcctgcatcgccgtattggcgaagcaggccgctattcagcgtaacgactcttttcgatagcaacgccaactatgttattatccgcaaactgtttctattttttattccccgcctgaggtttggcatgtccacgcgaattttagcaattgatacggcaaccgaagcctgttccgttgcgctatataacacggcaacgtcggccgcaaacggcgagaagctggcttattttgaactctgcgcccgcgagcatacccaacgtattcttcctatggttcagcaaattctgtcagaggccggcctcacgctcaatcagctcgatgcgctggcctttggtcgtggtcctggcagcttcaccggcgtgcgtatcggtattggtatcgctcagggtctggcctttggtgccgatctgccgctgctgcctatttctacgctacagactatggcacagggtgcctaccgtcagacgggggcagaacgcgttctcgcggcgattgacgcccgcatgggtgaggtttactggggcagttcacccgtcaatccgagggcgtgtgggaagggaggccagcgaggccgtgctgaagcctgaacagctggcagagcgcgaagccgcgattcagggccgttggttcacggtgggtaccggctggcaaacctatcctcaactgctaagttcaacagccgttgaacttgtggacggtaatatgctgctgccacaggccgaagatatgttacctcttgccattgccgcgtgggagcgtggggtgagagtcaatgccgcagaagcggaaccgacttacttacgtaatgaggtaacctggaagaagctgcctggccgataaaaacggcaacttgtgaaagaaaaagttgtcgaaatagataatgtacccagggtgtttaccatgcgtaagatattcacaagtaagaaaagtgtggccttggcggtggggttaagcgtgctgttgctgtcaggatgcgtcacggtgccgaccgctatccgcggcacgacggcaacaccgcagatgaacctggtggcggttcagggcgcaccgcagatttatgtcggtcaggaagcgcgatttggtggacgtgtcgtctcggtgaccaatgaaggcagccgcacgcgtctcgagatagctgcgatgccgttagactcaagcgcttcgccaattctgggtgaaccttctattggacgccttgcggcctattacaacggcttcctcgacccggttgatttcaaaaatcagctaataaccgtggtggggccgatcaccggcgctgaaaacggcagcatcggccaaacgccttatcgttttgttactgtcagcgtgaacagtttcaaacgctggcgcgaggtgcaggaagtggtgatgccgccacagcctatgggaccatggggttggggatatggaggcccctatgatccacgttggggcgaggcttcggcccggcatgggatttgacccgggcccggccagagtcgagaccgtcgttacggaataacccgccgccgcacggcgcgccgcctccacgtggggcgccaccgccgcacgcctcaccacccgtgcagaatcatccgtcacatgcggtgcctatgctccccctccgcctgcgagaaagtaggcgaagcattaacctacggcagcctggctccgtaggttatgcactcgttaatattgaccttcatcaagctttaattaacttctcactttcgtttcgcgtttatttcctgttttctgcaataataaacctgcgcctgctaatgtctggaataatacaggccctcatcctctctcacaggaacgtgaaaatgaataaaaatacattcaaacatatgatgctgcctgtctcatggagtacggtaagtgtttcgccggaagatactcaaaacgcaacggactttttcctgggactgcacttcgaatatcgtcttgatgaaggggaaaaactgccctcggcgaaagatatcatcgtgacgcttgatatctctacggccaaaataatgattgagaatctccagacctggttaacctatattgaaagcggaacctatacgccgtttggtatggtaaatcactaatttatttttgttacgctttctagtaaatgctaaccgtctttattgattggtatgatataaacatacctaataatataattaaatatagagctgtttctctttggcggcatttggccgccttttatttgtttcattttcacggattaattatgagtgcgccgagtgagttaaggccgttaatacgttattcgtaagggtttatatccagtggcaatgaaattttgtttctcaaggttattatgttggcatgcctgataatgaatttttgccagggcgtctgtcatggcatcaaaagaatttagccgctatacttcaataaataaatgatttatcagactttatagattttggttcgatggcgtttttattgtgccgtagaggttagtgagtgaaattagtgacctgcctctcaacctaaacattgtttaaagcttagctggtaagatgagttaaaatattgttaagggtgtggtaaaagtgcgttattgagagcgcgtgagataatgatatcaggagtgtaaccttggaaaaggtctggctaaaacgttacccggcggatgttccagaaaacatcgatccgaaccgctacagctcgttggttgagatgtttgagaacgcggcactgcgttacgcagacaatccggcgtttatcaacatgggtgaggtgatgtcgttccgcaagcttgaagaacgcagccgcgcattcgctgcttatttgcagaacgagcttgggctgaagaaaggggatcgcgtggcgctgatgatgcctaacctgttgcagtatcccatcgcgctatttggcgtgctgcgcgccggtatggtggtcgtcaacgttaatcccctctataccccacgagagcttgaacaccagcttaccgacagcggtgcctcggccattgtcatcgtctcaaacttcgcccataccctggaaaaggtcgtacacaatacgcaggttaagcacgttatcttgactcgcatgggcgatgagctttccgctgcgaagggcactctggtcaacttcgtggtgaaatacatcaagcgcctggtaccgaaatatcatttgccgaacgcggtatcgtttcgcacggtaatgcatcagggacggcacatgaagtatgtgaaacccaacgtcgttaacgatgacattgccttcctgcaatataccggggggaccaccggcgtcgccaagggcgcaatgctcacccaccgcaatatgcaggccaacctcgagcaggccaaagcgtcctatgggcctttgctgcgtctggggcaggagctggtggtcaccgcgctgccgctttatcatatttttgcgctgaccattaactgcatgttctttatcgagctgggtggcagcagtctgcttattaccaatccgcgcgacattcctggcctggtgaaagaactttcacgttatccgttcacggcgttgagcggcgtaaataccttgttcaacgcgatgctcaacaatgaagacttcaaaaaactcgatttctccaacctgcgtctttccgtaggcggcggcgcggcggtacaaaaatccgttgcggaacgttgggaggcgctcaccgggctgcatctcctcgagggctatggcctgaccgaatgttcaccgctggtgaccggcaacccttacgacctcaaacattacagcggcagcatcggtttaccggtgccatcgaccgacattcgtttagtcgatgaaaacggacacgatgtagccgagggcgaggccggagagctgctggtgaaaggtccgcaggtcatgctgggctactggcaacgtcctgatgcaaccgatgaagtgttaaaagacggctggctctcgaccggagatatcgctacagtggacgagcagggattcttgcacatcgtcgatcgtaagaaagatatgatcctggtgtcaggttttaacgtttatcctaatgaaattgaagaagtcgtctcgcagcatgcgaaagtgcttgaggtcgcagccataggcgtaccgagtcagtctaccggcgagaaggtcaaaatctgcgtggttaagcgcgatgcttctttaacggcagaagaaatactcgatcactgccgtcgcaatcttaccggctataaagtgcctaagattgtcgagttccgtgatgagctaccgaaatcgaacgtcggtaaaatcttgcgcagggagctgcgtgacgaggccgtaaaggccaacgcgcccgaccggcagaacgcagcctgaaccaatgatgctgtatttttcatcaactgaaggcctccttcattcaacgccggattaagtccggcgttttcacgttataatgcgcgtaacgcgaagcagtagtctttgttttctaatgcccggcggcaggatgcaggccgatccggtttttaacagcgaaaagagaaaaagctttgaattatcagttgatcgttagcaatgaagatctggcaaaggtttgtcagcaggcgcaacagtttagccagattgcgttggataccgaatttgtcagaacccgtacttactatccgcagttgggcctgatccagctctttgatggtgaaaccttaacgctgattgatcccttacctattactgcctggcagccatttatcgacttattgatccatcccaatgtggtcaagtttctgcacgcgggcagcgaagatctcgaggtcttcctgaatgcctttggcgtgctgccggtgcctttcattgacagccagatcctcgcggcctttagcgggcgtccgctctcctgcggttttgcgcgtctggttgccgagacaacgggcgtggaactcgacaagagcgagtcgcgtaccgactggatggccagacctttgacccagaagcagtgtgattacgccgctgccgacgtgttctatctgctgccgctggcacgtcagctcgagcaggaaaccattaatgcgggctggatagacgcggcactggacgagtgtgtctcgctctgccgccgccgtcaggaagtgctacagccggaacgggcttacctcgaaatcggcaacgcctggcagctgcgtccacgtcagttggcgtgtttgcagaaactggccgagtggcgtctgaatcaggcgcgtcagcgtgatttggcggtcaactttgtggtgcgtgaagagaacctgtggcaggttgcgcgctatcagccgcattctctgggtgagcttgaagcgctcggcctgagcggtcctgagattcgctatcacggccgcacgctgctggcgctcgtcgctgaagccgaaacgctggacgagtcggcactgcccgcaccgatcgctaacctgatagaccagcctggctacaagaaagtcttcaaggacatcaaggcactgattcagacggtaagtgaagaaacggggctcagcgtagagctgctggcgtcacgtcgccagataaaccagttgctgaactggcattggcagctgaagaccaaggaacatgaaccggagttggtgagcggatggcgcgggacattgcttcgcgagaggctagtcacgctgctggaacagagttaagcgctaagcatttaacgacattaaaaaggatacgccagagattgcgcgtatcctttttgactgatgctaaccggttgataaagcgcgttatcagaccgaaggctcaggctttttgatgtgaatataggtcaccagccgggtcataaacaccgtcagtaaggcaaaaatccctcccagcgtcgtcgcttccaaccgctgtacgccgatattcccctgtaccagaccaatgcctgacagcatgaagatgatcatcatggtaataaagaacgcaaaaaaggcgtaggttttcgaggtgagagaatacgacataaaaatagcgatacctgccgacagaaagaacgccaggattatcagcaaatcgtcgtgcagataggtgcttaacgtacccgccgccaatacgcccaccagtgtgccaatgatgcgtgccggcacgcgcagcagagattcgtgataatcgctgcgcaggcagattaacagcgtcatttcggcccaatagctgtgctgaatattgaaatgatggtcaagggtaatggttaagcacatggcgatcaccccgaaaaatattgaccaccggagatgaatatattgctgatttagctgctttacgccttcgtagaatttaatttttctcagggaggtcacttcacggaaattaaaacgcagcccgctaaagaacagtcccagactgaatatctgtagaatacagccgcagcctaatagcgtggcgcgggtagttgccgcctcgagtttccccgggaaaaaccctgagaccataaaggcgattgcagattgcaaaaatatccagcccagattggcgttaatatccaaaataacaatatatagcccggttgccagcagcgcgcccgctaaataaagcagcgggaaattacctgccaggctgcccagaaacgacgcagccattagccccagcgcggtggtaaataacacgacgaaagaggaatctcgccaggtcttattggccccaaacgccaatgaaagcgcgccgctggcaataagcatcgcaggagcctgtttgttcaaataaaaaccgacggcaataataatgataatggcaggcaaacaacataacgctaacagcaagttatgccgatggcctggggaatgctaatcaaaagagggttactccgtgccgcaaaattgaaaatgattgctcaaggtaacatatttgccgcgtctcaacgatgttgcgcatgtttcaaataggcgcaaaacatatcagccatagcctcggcatagagttcgatttcgttatcgctgcgtggggtagaggaaaatgacttgccaacgcgactcagcgtggtggcaatcaggtcgctgacccgctgccgactctcggcgggcaccgtcggcagcgcttcttgcatgaactcattaaaaatcctctctcccgtggcttttgcctcccgcgcctcgggcgcatcgcggtaaagcggtgccgtatcgctgagcgccgcccgtatctcggcttcctcacactctgaacgaatgaaaacatgcaccagcttacgcagtcgttcggtgggcgttttcgcgtgattttgcaggatatggcagagcatctcggtggtttgccgccattcgtcgctctgtaatcgaaacagtattgctgacttattggggaaatactgatagagcgaaccaatgctgacgcccgccgtttctgccacgcgtgcggtggtaaaacgggttgcgccttccttcgctaaaacgcgaacagcggcttcaagaatggcggcgaccagctcagtagagcgcgcctgctgtggctgttttcgcgaggaaacacgcgggatggggcgatgcgtcatggtgatatctgaaccctggactgaatgcgattagaaaatgtgatgaattcatcacattataaatatgaatgattcatcacattttagcctgtgactcacaggtgctcaaccccaagaggataaccatgactaccttaacaacgtcccccctagctcccttgctcgaccgcctgtttgctgaagcggacagcgtgaccagcacagtgctgacctcagtctctgccaaagagcgtgaccgactgatgcacagtaagaccgagtacctcagtctgtatggacgtttaaaagacctgtggttgcccgtttcgcgtgacaccggtgcgctgctgtacatgctggcgcgtacttcgaatgcgcaaaacatcgtagaattcggcacttcattcggtctgtcgactctgcacatggccgcggcgctgcgtgataacggcggcggaaaactgattaccagtgagtttgagccgtccaaggtacagcgcgctcgtgcacactttgtcgagggcggcgtggcggacctggttgaagtccgtgaaggtgacgcgctgaaaactctggcggtctctctgccggagaagatagatctgctggtgctcgacggcgcgaaggcgctttacgatgacatcctggatttgctcgagagtcgcctgagggtggggccatcatcgtcgctgacgatgctagctacaacgccgaatatctggcctatgtgcgttcggcggcgaacggttatctgtcggttccgttcggcgatgacgttgaggtgtcgatacgtctcggctaaagacgcggcggctgtgcgccttcaaaaacatgctcgacgacccaactcgcgggcttgatttcgccctgaggaccaaacaccagcggccgttgggccggtcgtccatggtcctgaacggcaccggcaatatgggggctgtcccaaacgccccaggtaatgacggtggagacggcgcgtgtggcgagaaccgcctcgagatagcgtttataggtcgccgcgaccgcatcgtcacgggcttgcatcgaaccgttaaactggctgtcatcgacgtccagctcggtgacataaaccgccaaccccagtgcacgtaccgcgaggatgaaccgcgcaagctccggcccaaaggtgtcgccgaggcgtaagtgcgactggatgccaagcccatgaatcggcacgccgcgttttatcaggccctgtaacagagtcagaaccgcggcacgtctgctttctccatagtgagtgtctttttccagcccgtagtcgttgtagcacaatacggcaccgggtcagccttatgggcggcatgaaaggcaacgtcgagatagcgcgggccaagcatctgataccaaaaggcattgcgcagcccgccgggttggccatcttccaactgaatggcctcgttgacgacgtcccacgaggccattcggccgcgataatgggcggcaacggtggtgatgtgtgcgttcagcacgctctcggcgttagtcggcgtcacggttttgtagacccagtcgggcagtgcgcgatgccagcagaaagtgtggccgcgcaggcgttgctgatggacctgggcaaaggcggcgagggtatcggcctgactgaaatcgtagcgctcgggttccgggtgaacggtctgccatttcagggcgttttccgggaccagaatgtccgcctgacgggcgacgacgtcacggtaagtcgcatcggcgtcgagctttttcgggtctaccgcgaaaccaaaggcaatgcctttatctttcgccagttggcgcaagggtgaaaagggggcggcggcaaaggacagtcggctacccataaagggcgcgcagagcagcaaactcagggagccgagaataaaaccgcgacgacttgcggttgaattttgtgtagaggcggacctaaacccatcgttaactccatgagcagaatcgaaggcgcttatggtgctgatagcccaaagactgcgatgagagagtgcatagataaagtctatgcattaaaccaacaaatggcggatctgctcaatatgtcggtacatcagctcctgtatctgtaccacatgcgcggcatccgctttttcgcgcattaaatagatgcctacgttgtagcgcgggctttgctgcgtggtttgcagcgccacgatgttgtatcgggcaaagtagcttgccatacagcttggataacttagcatcaccgcatcagactcgttgatcatgtccacggcggccatcatcgagttggtcgaccagataaccctttcttgcagatgcatccggttacgcgccagcctctttggctgcatatcttcaaccatatgctgaaaacgcccctcatccggggttagttctacgcaaggatagtcctgtagatcaaaattttcgatcacccggctgcacagcggatgcccacggcgcacaaacaggctgtcggagaccccaaacagcggcaggaagctgatccccgccttggcattaagcccctgaatttcatggccgataaacaagtcaatgtcgccgccgagcagcaggtccatcagcctgaggtggttaccctgatcgatatgaatattcacggtgggatgcagcgcccggtagctgttgaagctgtcgcgcataaacatgtgccaccaggcgtggccggtacccatgcgcagactctgcacctggcgcgccttgataatggccaacttggccagggtgttgtcgtaaatcctctgcatcatttgcgcctgctcaagcagcagatcgccatactcggtggttttgacgccggtcgaggtgcgctctagcaaaggaacgccaagattttcctccaatttcttcatgttatgcgtcagcgtgggttggctaagacataatttgtttgcagcatgactcacatttttgaacatagccacttcgataaactgccgaagaattttatccacgatcacacattcccttgatgatatagagtatttctatatcgtagaggcgaaaatcaatttccgccaatgtctccgcttcgctatttttctcgcatgacggtattcccgccatcacctgagaagaagccatgagaagagtgatcccgggactgattgctgccgcgctggccctgacgtcgggtttgacgcacgctgatacgctgcgaatggaatgtccacctagcaaggaaggtcgtcagttctgcaacgagattaagcagcagtttgaggcccagaccggtaataccctggcatttatcgatctcccgccagcttcaaatgaaaaactatccttatttcaacagctatttgccgccaaagattcgggggctatcgatctgtttctggccgataccgtctggattggcgtgttgaacaagcatctgctggatttgaccgacagcgtgagcagtctgcgcacagaggttttccctgcggccctgcaaaatgatgtcgtcaatggtcgtgtcaaggcgattccggcttatatggataccggtgcgctctactaccgcaaagatctgctggagaaatatcacgaacagccgcctgtcacctggagcgacctgacgcgtatcgcgacccgcattcagcagggcgaacacgatgcgggacataaaaatttctgggggctggtctttcagggcaaagcctacgaaggcttgacctgcaatgcgctggagtgggtggcctcgcagaacggcgggtcgtttattgactcccaaggcaatatcaccatcaataatgcgcgcgccgcacaggccctcgacatggccgcaggctggataggcaaaatctcgccgcccggggctttgggctacatggaggaagagtcccgaccggtattccagaacggcgatgcgctgtttatgcgcaactggctttatgcctacaccctggctgaagacccgaccagtcctatccgaggcaaggtggctgtgatgccgctaccgaaaagcgatgacggggtttctgtcagtgcgatgggtggctggcactgggccatcagcgcctataccaagaatccccaggcggctatcgcactgttaaaaattgtcagcagcgttcagtcgcagaaaaaggcgctggcattgatgggtgggcaccttcgcgcactgcactttacgaggatcctcaggtattggcgcaggccccattccttgccgattttaaggggattttcatgcacgccgtgccgcgtccggccacgcaaacccgccgtcagtacgctcaggtatccaacgcaatctacaacaccacctacaacgtcttgagcggcaacagtgacggggcgtccgccgtcgtggcgctacagcagcggctggaaatcattaaagccaaaggatggcgttgaatgcagtcccccttaacggaattcacggtttggagtctgatgcatgaagcaagaaatcacctcgttatccctgcccggcagtcaggccggaagccgcgtagcgaaacgcacaaagctaagctaccggctgcgtcgtagccgaattgcctggctgttggtggcaccggcctccttctgctggtagccaccgcaggctggccgctgttgcgcacgctgttttacagttttaccgacgccatgctggacgcacccgatgactaccattttgtgggctttgccaactattttgacctgaatcagggaggccaccattacggggtactggccgatccgctctggtggcttgccgtcggcaacaccttgcgctttagcctgctgtcggtctcgtttgagctggtgttcggtatgctgctggcgctgctgatgaatcaaaaattccgcggtcagggactggtgcgaaccgccattctggtgccctgggcaatcccgaccatcgtctcggccagaatgtggagctggatgtttcacgaccagtacggcgtcgtgaatgacctgttgctcaagatgggcgttattagcacgccgctggcctgggtcgcagaaccgaagctgtcaatgtgggccgtggttatcgttgacgtatggaaaaccacgccctttatggcgctgatgctgctggccggactgcagcttattccccgcgatttatacgaagccgcgcggattgatggcgctaatgcctggcagcgttttcgtcgcatcacgctgccgctgattatgccggcgatgattgtggcgctgattttccgcgtgatggatgcgctccgggtgtttgaccttatctatatcctgacctccaacagtgaatcgaccctttcggtgtccggctacgcacgtgacctgttggtgagctatcaggagatgggatccggctccgccgcctcggtgctggtatttatgatggtcgccggcatcgctgcctgcttcttgatgattggccgccgtaacagcggggaggcgaaatgatgagcctgaaactgcaacgacaaaaaatggcccagcgcgtgctgattttcaccagcgcagccctagcctgcattatctgccttttcccgttctattacgccatcctgacttcactgcgttcggggcaaaacctgttcagggtgggctggttacccaacgagatgaattggggcaattatgtcaccgcattgatggacagtggcatcgctcgcagccttctcaattcggcgatagtggcgaccctgacggtagggctgtgcctgctggtgtcgattacagcagcatttgcgctggcacgcattggcttccgtggccgtaagtatctgctgttcaccatcctttgtgtgtcgatgttccctcagattgcggtgctttccggcatgttcgagctggtgcgtttcatggggctttacgactcactcggggcactggtgctgtcttacaccaccttttcactgccgttcaccatctgggtgctgaccacctttatgaaggcgattcccaccgagctggaagaggccgccatcgttgacggtgccagcacgtggaccattatcagtcgcatctttgcgccgatcatggggccgtcactggtcaccaccggacttctggcgtttatcggcgcctggaacgaattcatgtttgccctgacgttcgttatctccagcggcaaacgcacggttcctgtggcgataggcatgcttcagggctcctctcagtatgaacttccgtggggcaccatcatggcgtcctcggtgatagtcaccttacccatcgtggcgctggtgcttattttccagcgacgaatcgtcagtggattaacccatggcgcagtcaagggctgatgcccgaattacaacttgcaggagagcagaatcaactatggctaccaaaatcgttttgataggcgcgggcagcgcacagttcggctacggcacgctgggcgagatattccagagcacaacgctgtatggcagtgagattgtgctgctcgacatcaatccaaccgcgttggcggcgaccgaaaagaccgcccgtgattttctggcggcagaggacctgccgtttaccctgacggcgaccaccgatcgcctgacggcgctgcgcggcgctgagttcgttattatttccattgaggtaggcgaccgctttgccctgtgggatctggactggcaaatcccgcagcagtacggcattcagcaggtttacggcgagaacggcggccccggcggcttgttccactccttgcgcatcattccgcctatccttgacatctgcgctgacgtggccgaagtctgccccaacgcctgggtattcaactattccaacccgatgagccgtatctgcaccaccgtacatcgccgcttcccggagctaaactttgtgggaatgtgccacgaaattgcttcacttgagcgctacctgccggagatgctgggcacctcattcgacaatctctccctgcgtgcggccggtctcaaccactttagcgtactgctggaggctcgttataaagacagcggctacgatgcctatcctgacgtgcgcgccaaggcgccagactatttctccactctgcctggctatagcgacattctggcttacacccgtaaaaatgggcgtctggtggagaccgagggcagcacagagcgtgacgcgctcggaggccgcgacagcgcctatccatgggcagaccgaactctctttaaagagatccttgagaagttccaccatctgccaatcactggcgacagccatttcggcgaatacattcgctgggctaacgaggtcagcgaccatcgcgggatcctcgatttctacaccttctaccgcaactatctggggcaggtacagccgaagattgagctaaaactgaaggaaagagtggtgcctatcatggaagggatcctcaccgattccggctatgaagagtctgcggtcaacattcctaataaaggctttattaaacagctgcctgaattcattgccgttgaggttccggctaccgtcgaccgcaaggggattcacggcattaaggttgacatcccgagcggcatcggcggcttgctcagtaaccagatagccatccatgacctgactgccgaggccgtgcttcagggctcgcgcgatttagtgatacaggcgctgctggtggattcggtgaacgacaaatgcagggcgattcctgagctggtggacgtcatgatctcgcgccagagtccttggctcgattacctgaaataagccgcattgctgcactcatgccggcggacggccggcatttcattatcatggatttggagaacaatatggcgcaattgacgttagacaaaattcagaaacgctacggtgccaacgcggaggttatccaccagctcgacctgcatatcaacagcggggagtttatggtggtggtcgggccttccggctgcggcaagtctacgctgttgcgcatgattgcggggcttgaggagataagcggtggcggcatgtatatcgatggccattacgtcaacgatgacagcccggccgaacgcggtatcggcatggtgttccagtcctatgcactttatccgcatatgagcgtttaccagaatatggcctttgccctcgagctggcgggccattccaaatcagagattgaccagcgcgtgcgggaatgtgcacggattttgcagctggagaagctgctggaaaggcggccgaaagacctgtccggcggccagcgccagcgcgtggcgattgggcgagctatcgtccgcgagcctcgtttatttttgtttgatgagccgttgtcgaatctggatgcgtcgctgcgcgtgcagatgcgcatggaggtcgcggcgctgcataagcggctgggcgtgaccattatttatgttacccacgatcaggtggaggcgatgacgctggctgaccgcattgtggtgcttaacaaagggaaaattgaacaggtcgggacgcctcttgaactctatgaccacccggctaacgagttcgtggctcagtttatcggttcgccaaaaatgaacctgattccggcaacgctgcgccagtccggtgaacggcaaagcgtggtcgaactggacaacggcaagacgctggtgctgcctgtcgcgaccccggcgtcggcacagggtcgaagcgttaacatcggcattcgccctgagcatattcgcagcggtgacgccgcgcagtgcgaatatcaggggaagtgaagtttgttgaacaaatgggcaatgaaaccttgctgtatttggacaacggcaacgcgagcgaaccctgggtggtgcgccatcctgaacgctctgctattcgcgtgggcgcgacggtggggtgcggctgccggttgagtgctgttatctgttcgacagccaggggcaggcgtttcagcgtatcaaggtaaaaagtcactcatcggtcccggaggccctcacgctatgacggatagaaagacggcggaagcctggaaagaggcggtggtctatcaggtttatccgcgcagctttatggacagcaacggtgacggtattggtgacctggctggcattattggcaagctcgattatttgcagcagctgggcgtcaatctcctgtggctctcaccggtttatcgctcgccgatggacgacaacggctatgacatctcgagctacgaggacatcgccgaggtgtttggcaccttgcaggagatggaacgcctgatcgccgaggcgaaagtgcgcgatatgggtattctgatggatctggtggtcaatcacacctccgacgaacatccgtggtttctcgaggcactaaagtcaacgaacagcccttatcgggatttttatatctggcgcaaacccgcagcagacggcggaccgcccaacgatttccgctcctactttggcggcagtggctggacgttcgacattgccagcggtgaatactatttccatcaattttccaaacggcaaccggatctcaactgggataacccgcaggtacgagaagaagtgcacgcgatgatgaatcgctggctcgacaaggggatcagtggctttcggatggacgttatcgacctgattggtaaagacgttgacagacaggtgatggtcaacggcaagaatctgcatcagttcatccaccagatgaaccgcgccacctttgggcatcgcgactgtgtgacggtcggtgaaacgtggagcgcaacgccggaagatgcgctgctctacagcgccgaacaacgcgaagagctgtcgatggtgtttcagtttgagcacatcaaactgttctgggacgagcatgacggcaagtggtgcaataaacccttcaatctgctgcgcttcaaagaggttatcgacaaatggcagcgggcattggcccatcagggctggaactcgctgttttggagcaatcacgacctgccgcgggcggtttctcgctttggtgatgatggccgctatcgcgtcgcttcggcaaaaatgctcgcgaccgcgcttcactgcctgaaaggcacgccttatatctatcagggcgaagagattggcatgacaaacgtgcgctttgccagcattgatgactatcgcgatattgaaagcctgaatctttaccgcgagcggacggaggccggcgtcagcgatgcgcagatgatggaaggcatctacgccaatgggcgcgacaatgcgcgaacgccgatgcagtgggacaacagtccgcatgccggttttacccaaggcacaccctggattgcggctaatcctaattatcagcaggtgaatgtggcggcggcgctggcctgtcccgactctatttttttccactaccagaagctggtggcgctgcgaaaaaaactgccgttgctggtgcacggtgatttccagcagatcttcgccgaccatcctcaggtctttggctggctgcgtaggttcaacggtcagacgctggtggtcatcaacaattttaccccgagcccgtcacgctcgacgtgcctgaggcgatgcagggaaaacaggggacctgcctgatcaccaactcttcaccgcgcgtgcggctgccagccagcctggagctgcaaccttttgaatcttttgctttattactggagaggtcgtaatggcgaactggtggaaagaggccgtggcctaccaaatatatccacgcagctttaaagacagcaacggtgatggcatcggcgatttgaacggcatcaccgagaagctcgattatctacaggatctgggcatcgaccttatctggatttgcccaatgtacaaatcgcctaacgatgacaacggctacgacatcagcgattaccaggacatcatgaccgagttcggcacgatggcggattttgaccgcctgcttgcgcaggttcacgcccgcggcatgcggttgatcatcgacctggtggtcaaccatacgtcggacgaacatccgtggtttatcgagtcacgcgcttcgcgtgataacccgaagcgtgactggtacatctggcgtgacggcaaaaatggcgcagagccgaataactgggagagcattttcaacggctcggcctggaagcacagtccggagaccggacagtactttctccacctgttctccgaacgccagccggaccttaactgggagaacccggaggtccgttcggccgtatacgcgatgatgcgctggtggttggacaaaggcattgatggttttcgcatcgacgcgatatgccacatgaaaaaagaaccggccatgagcgacatgccaaacccgctggggctgcatttcgtgccctcattcgaacgccacctcaactacgacgggctgcttgattacgtcgacgacatgagtgagcaggtgttcaaacggtatgacatcgtgacggtaggggaaatgaacggcgcctcggccgagcagggagaagactgggtgggcgaggcgcgtggcaggctgaacatgatcttccagttcgagcacgtcaagctttggcaggacagtcagggaggcttgcgcgagccggagctggacgttcgcggtctgaaaaacatctttacccgctggcagacgctgctcgaaaacaaaggctggaatgcgctgtacgttgagaatcatgacctgccgcgggtagtttccggctggggcgaggtgtcgcgttatcggcgggaaagtgcgacggcaattgccgcgatgtatttcctgatgcaggggacgccctttatttatcaggggcaggaactgggcatgaccaatacgcattttgccagtctggatgattttaacgacgttgcggccagaaggcgtgccactgaaatgctcaggcaggggatcgatgagaaggcggttctgtcgttcctgagccgcaatgcgcgcgacaactcgcgcacgccgatgcagtgggatgagagcgttaacgcggggtttagcaccgcccggccctggttcccggtgaacgccaattatcgtgaaattaacgttgcgcgtgagcgggaagatgccgattcagtactcaatttctaccgtgcgctgatacgcctgcgtcgccagaagccggtgctggtttatggccgctatgaaattctgctggccgatcatccttatctctacgcctatacccgcagtctggaccaccaacgggtgctggtgctgtgcaatatcagtgccttgactcaggatgttgacgcgaatcagttagcgctggaaggctggcagccgctgctggggaattattcgaatcagggagaaagccaaaaactgcggccttatgaggcaaggatttaccagcggcatgaagcggccgaactccgctaaataagccttaaatcgatgcgcgatgcagccaggggctcgccacgcggaccgtctcgcgatggctatctccgttgataatgtgcagcgcactcaggcgaccaatctcataatgggggagctgtacggtcgacagcggcggcagaaaaaggtcgccaatgccgaccatattgtcatagcccagcacgccgacatcggtggggatgcggatgccgtgtgaaagcaaggtctgataaaccaggaaggcgatacggtcgttgccacagattacgcagtcaaaggtcggtttgccctgcggcatctgggcctcgatcatcgccggaatgtcctggtagtgagcgtcaccgtccggcatatagcaatgtatccacgtctcgggatttagacccgcctcgagaccggcgcgagtcagccccttttggcgacgaacggttgccagacgggcaaagggcaggtgcaggcacaggggcgacgataacccgccttcagcaacgctttgacaccttcatactgaccctgctcatcgtcaggaatatagctggccaccggctggtgcagactttcacagtttgccagcacacagggcagcgtcaggagcttggcgggaaccgggacctgtcgcaggcccatggtggtgtaaattatcccgcccgggcggtgggagagcagcagatcgacaatcttttccggactgtcgtcggagaacatgttgaccacaaagctgttccatccgtgggcgcgggccgtttcttcaatggataaggctatctcaaccgagaagggggttgtcaccgtgtccagcgccagcacaccgatcgttttgggcgtggcgcgtgcaccacggatttttttggccgacaaatcggggacgtaatttaattcgttaattgcggcctgtacgcaggcaagcgtgtcaggtctgagcctttctggactgtttaaggcccgcgataccgtcattaacgatacgtttgcccgctttgccacatcttttaacgacgccatgagtacctgtcttgattggaaagtgtctggccaatgcccctgtctgcatcaggctatacaactcactttatgatgtaaaaggatgcggcgatatttttgttcaccgtcatctccctgaggagtctttaaacatgacgttaaaatttgatcatgctcccaattgcactatgttaacgttaacttgtgtgattaacatcatgtatcgccgcaaaagcaggtgagggtgatgatttgttaacgttaccatttcatcattatccctcatagagatcgttatgatgaaaaaacatcattctcgcagttactcgcttttaagtgcgctgttgttcttcttttttgtgagctggtcatcctccggctctttgctttccatttggttacatcaggaggtgggattgaaagccatggataccgggattattttttccgtaatgtcagtctcggcgctctgtgcccaggttttttatggctttattcaggaccggcttggtttacgcaagaacctgctgtggtacatcaccgcgctgctgttcctttccgggccagcctatctgctgttcggttatctgctcggtatcaatattttgctgggcagtattttcggtggagtgtttgtcggaatgacctttaacgggggattggagtcctcgagtcttacaccgagcgggtggcgcgtcaaagcacctttgaatttggcagggctcgcatgtgggggtcgctgggctgggcagtggcgaccttctttgccggtattctgttcaatatcaatccaaaactcaactttctggtggcgtcatgctccgggctggtgttctttggtctgctggcacgtttaaaagtgaatacgccagcgagccttgagaaactcgaactggggatggcgaaagtcacgcttgaagacgcgctgagattattgaccttatcgcgcttttggaaactggtgttttttgtggttggaacctgcatctacggcgtctacgaccagcagtttccggtttattttgcctctcagtttgccaccctgcatcaggggaatgcgatgttcggctatctcaattcgttccaggtcttcctggaggcggccgggatgttctgcgccccatggctggtgaatcgcgtgggggccaaaaacggattgatctttgctggcatgacgatggctctgcgcatgattgcctcggggctggtggaagggccgctgctcatttccatcaccaaactgctgcatgccgtagaactccccgttctgctggtttccatctttaaatataacagtctcaacttcgataagcgtctctcctcaaccctctatcttgttggctttgcctgcaccagctcggtgattgcgacggtcctctctccgctggccggctatagctatgaaaaatatggatttgcccaatcctatctcatcatggggctgatggtatttagcaccacctttatctcaatctttcttttacgcagcaataagccctctccagaagatttattgtcacaaccttctgccgtttgaatgaaataagagtgaatgaatatgacgttattaatagacaaagccgaacaagcactcagggttaaaggtgaacagctgaacaggcgctggtaccccgaatatcatctggcggcaagagcaggctggctgaatgatcctaacggcctggtctggtttgagggctggtatcacgcattttaccagcatcatccttattccacgcagtgggggcctatgcattggggccacgcacgaagccgcgatttgctgcactgggaacatctgcccgtcgcgctcgcgccagaaggaccggaagataaagacgggtgcttctcaggctctgcggttgtcaacggtaacgagctggccctcgtctataccgggcataagtttcacggctgtcctgcgagcgacgataacctttatcaggtgcaatgcctggcaaccagcgaggacggcattcattttaatcgacagggacaggtgctcgatacgccggccggactgcaccatttccgcgatcctaaagtctggaaagagggcgagagctggtacatggttgtcggcgcacgcaccgaagataccggcatggtaaggctctatcgctcagaggatcttcgccactggcatgatgaaggggtgcttgctgtcgccccgcaaggcatgggattcatgtgggaatgcccggatttcttcacgctgcggggcaaacaggtgttgatgttttccccgcaaggtatgcaagccgagggatattcgaatcggaacttattccagagcgggtctatcgtggggcactggcaaccgggagaaaactttgtgcaagaagtcgcgtttcaggagttagaccacgggcacgatttttatgcgccacaaagtttcctggcacccgatggtcggcgcattgtgattggatggctggcaatgtgggaatcaccgatgccggaacagcgtgacggatgggcgggaatgctctctttacctcgtgaacttaccctgacggcggaaaatcgtctgcaaatgcgacccgtaaaagaggtcgaagcaatgcgtcaggatttctcaagctggtcggcgcagactctggataatcaggtgctgtgcgtgatggaccactgcgaaacgacggaggtgattctcgagtgggacagggtggggagtgatgcagagcagtacggtattgctctggaggagggatgcggctgtatgttgataaccaggcccaacgcctgattctggaacgtcattatccgcagtttggactctgtggccaacgcagcgtgccattaccgcagacggcagcattgtcacttcgggtctttttcgacaagtcctccgttgaggtttttgttaatgatggggaagcctgcctgagcagtcgtatttatcccgaccaacgaaagctgcatatctttgcctggtcaggtaaagccgtgctcaatgaaagtggtgcctggtatttaaaataatttgtaaataataaccttgcccgtaataaacgggcgggtttctcacatcaataataaaatataacccttcggcaaggattaattcgatgaataaaaaaatcggactggtgctgtgtttcagtattttctctggtgatcttcttgcacaatcctctctcacattagagcagcggtttgcgttactcgaacagcggttacagtccgcagaaaaacgcgcggataaagctgaggcggaaattataaagctaaagcaaggggcgggtgaaataaaagagaatatcgtcgccgtggttaaaagagaaagtcccctttagtgaaatcaaatcctaatgcagaactaaagttctatggtgacgttgaatttaatctcgatggcgcaagccgtacgggcagtttaacttcgttaaaaactagcgctaataaaaactgggcaccgggtaataaggagcgttgggatattaatggacgtatattgttaggtctggaagggatgcaaaggtcgaccgctggccgttacgccggattcaacgttcagccgctggcggatatgaatggcaagatgaatcttgacgatgcggtattcttctttggccaacaaaacgattggcagatgaaagtcgggcgttttgaggcctacgatatgttcccgctgaatcaggacacttttgtcgagtattccggtaataccgcaaacaatctctacagcgacggctacggctatatttacatgatgaaagaggcacgcggccgcagcaacagcggtggcaacctgttggtcagcaaaacccttggcaactggtattttgagctcaataacctggtcgaggatggcagttctctgtatgtcgacagccgctaccacggcacggaattggaaaatcaaaaaaatgtggtgtacacacgtccggttgtggcgtggcaatccggtatttactccgttgcggcggcgatggaaagcaatctggtcaagaatgcctatggttataacgacggcaacgggaaatggaacgatcagtccaggcgcacgggctatggcttaaccatgacgtggaatacgctgaaaaacgatctcgagaatgggatggtcgttaacctcaacaccgccatgatgaatgcgaaagaggagaaggacttcagtgcgggcgttaatgcgctctggcatcgcgtcgagctgggatatatttatgctcacaacaagatttccgagtttaatatttctggagttaatgaaagctgtgataatgaatgttcgattctggcgccgggtaattatgatattcacactctgcatacttcctggcagcttcctgatattatggcaatgcctaacttcaatatttatctgggtgcctacacgtcctggctaaatgcctcctctgaagagcagggcaatcatcaacctcgttatggcgcacggctgagattcaaatatctgttttaagacagggcggtctttttctccgctagccttgctgccaatcagataaagactcccctggataaaaacagggggtcttatgcagtcttggaaacagcgatagctatacagcggatcaaagatggcgaggtttctcaaagcatttctaggcgaaaagaacaatggaataatacccatactgcaactctagaggattataaaataaacgaaagagaactgagcctttatactgatgagaccctacaagccgattgtgatcaggaactaaaagatgccttgggaggataattcaatgtctttaaaagatataatcaaaaatgaaagtgtagaggatatattaacatttttaggaccaacgtctgactatccaaagttagataagttatttacatacaaccgatatggtgtagttacctgtggagagctttcatctaaatacgatgagttatttagaaaaggtgtactagctgatcaaaatgggaaaatcgtaaaaggcccgaactggaaataacctaaatttgtaactgagaaaaaatacggtatcgtataatcgctagcgctttctgataaatccattttaagcaacgttcagcaaccgaaggtttgttggacgttttatttggcggttagaaagggaaaccgctcctaattccgaacaggatttcgaactattcaatgaccctaccccaaaaccactgcctgttatttttcaggtcacatacctgaaaacaattattcaagcattctggtcatttcaaaaagtaaaagtcgtgaatatctaccgtcagaacgtcaacgggcggaaaaaatcatcccctgttccaggaacaggggagggttactcaaagccgatcattttggtgcttcttccgactctgactcaggaagcgtcacgttcagctcaagcaccgatatatcgtcgcctttctgctcgaactgcacgtggagcatttcagggtcaatctgaatgtacttacagatgaccgctaaaatatcacgcttcaggtcaggcaaataggcgggttcactgtcccctcgacgccgttcagctacgataatctgtagccgttccttggctatgttggctgtcgattttttgcgggacaaaaagaaatctaacaatgccatggcttatcccccaaacaggcgtttcaggaaactcttcttctcttcctcaataaaacggaacgcacgttcctcacccagcaaacgactgaccgtgtcatcgtatgccttacctgcgtcagactcctggtccagaataaccggttcgccctgattggacgcacgcagcaccgattgatcttcagggatcacgccaaccagtggaatgcgcaggatttccagcacgtcttccatgctcagcatgtcgccacggctaacgcggccagggttgtagcgggtaagaagcaggtgttctttgataggatcctgaccctgttccgcacggcgggattttgaagacaaaatgcccaaaatgcggtcggagtcacgaacagaagagacttcagggttggtagtgatgacggcttcgtcggcaaaatacagtgccatcagcgcgccggtttcgatccctgccggagagtcacagacgatgaaatcaaagtccatatcggccaggtctttcaggattttttcaacgccatcacgggtcaacgcgtctttgtcacgcgtttgtgatgccggtaaaatgtagaggttttcggtgcgcttatctttgataagtgcctgattcagcgtggcatcaccctgaataacattgacaaaatcatacacaacgcgacgttcgcaacccatgatcaggtcgagattacgcaaaccgatgtcgaaatcaatgacgacggtctttttgcctttttgggcaaggccggtagcaatggctgcgcttgaagtagtcttgccaacgccccctttacccgatgtaacaacaattatgcgtgccatgtaaagattccttgtcaaaggtcgtagtgtctgccccagagggtaaaagaggcgcagaaacttaatataaaggttgtacggttaacacgttatcctggaggcgaagtctcgcagcctgtccaaaatagttggacgggatttgatcgctcagccaatactggcctgcgatagagactagctcagcgccaagatgcgtgcaaaatatctgacaattcgtatcacccgcagcgccggccaatgcacgaccgcgcatcatgccataaatatgaatgttgccgtcggcaataagctcggcaccggcactcacgctgctggttacaataagatcgctgttacgggcataaatttgttgacctgaacggactggcgtactgacaatccgcgttttggcaggggcattatccggtatcaccggaaccggggccggcggctctgcaagggcacgcttgacgcgtccttcgcttagcagcggtaaaccggtaagcgaaagcgcacgcttttgctgttcatctttgcacccactgatgcctacaacgcgaaagcctgcagaaacgacagcctgttgaatttttttccagtctgcatcaccggtgagtgctgcaacattgataacaacaggggcatttttcagaaatgcaggagcttgctccaacttttcttgtaatgcctgatgaataacctcgggttgtgcactgtgtaaatgaacaaccgataaggtaaaactgctgccttttagttctattggcgattgtgacatctatcctgactcagtctcagcatctttaaatccccggaataccacacggggggcgatattccgatgtacgttatgcatggtatagttacagctatatctaggcaagccaccgttccaataaaatagagttaaaaaaatgctttgtgcaatttatagaagtaataaacgtgatcaaacctacctgtatgtcgaaaaaaaagacgatttcactcaggttcctgaagaactgatgaaaagtttcggcaagccggtgttttctatgatggttaacctgggcacgcgcgagaagcttgcgaccgcagatattgaaaaagttaaacaagagctgaccgagcgcggctattacctgcaggtgccacctccgaccgagagtctattaaatatccacctcggctcagacaataaataatcagattattctagggaaaatctgacatatcccgtcttttatgaaaatgagaggcgggagtcttgcattcatcctcgcgctcctgcacgttagcccttatgagaagcacaatgcatttgcaatgaagcattgccataaaggttgccacgaaaaggaagcacgcgatgagcttaaaactatcggttatcaccctggcgatgggcgctgtggcattaagcagctgcgcgaacgataagacccagtctgcccctgcaagcgttcctgctgccactgtggcgcctgctgccgccaaacctgcccaaacgaccttagccgccgagggacgcaatcctgcagagtttcctgcctacgttgaacagcttaaacaaaaggccagacagcagggtataagccagaaaaccctcgatagcgcatttgccaacgtgcatttcgtcgacagagctatcagcctcgatcaaaatcagcctgaaaacaagataaccctcgacgactatctgcgccgcgtacttgttacctctaaaatccagcagggccaggctctggctcaacaacacgcggccgaactgcaaaaagtcagtgaccgctatgctgtacagccacagtatgttgtcgcgctgtggggcatggaaagtaattacggaaagatacagggcaaagatgacgcattctcggcgctggcgacgctggcctttgaaggtcgccgggaagcatttttcaccaatgaattaatcgcagcactgactattgttgaacaaggtaaggcaaccagtgagatgatgaaaggttcatgggccggcgcgatggggcagacgcagtttatgcctagctcttacctgaggtatggcgctgacggtgacggtgacggcaagattgatatctggaacaatacctccgacgtctttgcctctgcggcgaactatctgtcatctgaaggatggaaggcaaatcaggggtggggaatggaggtcaaattacccgccggttttgacaccacgcaggttggtttgaaaaacgatcaggcgcacagcgccgcagaatggcagcaaaagggcgtgctgtcgctggacggtaaacctttacctgcttctgtgacgcgtgcctggattattacgccagactccgatcaggggcgcgcatttatggtttacgataactttaggaccatcatgcactggaatcgctcttactatttcgctatcagcgttggcatgatggcagatgatatcgccggagcctccgtgcaatagcgacctatttttagccagcaacaaccggctggcaagggagagagcccaatgtatcagcatcgtgattggcatggcgcgtttctggattatcccgtgagtaaggtggtttgcgtaggtaataactatgcaaaacatatcaaagagatgagcagcgcagcatcgacagagcccttggtgtttatcaaaccggaaaccgcgctgtgcgatattttgcaacccgtcgccatccccaaggatttcggcgtggttcaccacgaggtagagcttgccgtattaatcggttcacctttaaagcaggcgaacgagcagcgggtgagtgaggcgattgcaggttatggcgttgcgctcgatttgactctgcgcgaactgcagagcgaatttatcaagcacgggcagccctgggataaggctaaaggcttcgatggttcctgcccagtgtcgggatttatttctgccagcgagtttggtgatgcacagcaggctgaactaaaattagtggtcaacggtgaggtgcggcaagagggcaacacgtgcgacatgctcaccccaatattgccgctgattgcctacatgagccgattcttcacactgcgcgccggcgacatcatcattaccggcacgccgcatggcgtagggccaatagctgccggtgacgctcttgaaatctttctcaacggcaaagcaattacgacccgcgtcatctgacaggcgggttgaatgacagggcgcaaccacaacgcggctgctattatgggtcgctttgcttgcatctcgaggctaaagcgtctatatagtcagcctcatttttattaaaaccggatgtcactatgtctcaacccgctttttggcagcaaaaaacgctgtctgaaatgaccgataatgaatgggaagcactgtgcgacggttgtgggcaatgctgtttacataagctaatcgatgaagacacggacgagatttacttcaccaacgttgcctgcaaccagttgaacatcaagtcttgtcagtgtcgcaattacgagaatcgttttgcgctcgaagaagattgcatcaagctgacccgtgagaacctgaccaagttcgactggctgccgccgacctgcgcctatcgcctgattggtgagggcaaggatctgctgccatggcatcctctgttgcataaagagtccaagtcagccatgcacgccgcccgcatctcggtgcgtaatattgcggtacgcgaagacgacgttgttgactggcaggatcatatcttgaataagccgcagtgggccaggtaggtttctgaagtataagcttttgtgactcaaatttttggggcttgaggcatatctgggacagaatgattgaaaccagaattcataaccgacattggtctgagttgttttcgctcatccatttgccgtaaaggtcataaatcctctgggctgaagtatggcccatttgatgggcagccgcgctacaaatacgatagtgcgctcatcagttcgagttttccctctccaccactccagatgtgtactgctagctttggttattcttctatatcttgttaacgctatttggcaatgcctcaatggctgctcatacccgtgcccagcttgaaagtgggtgacttcaagccttagacatcatcaacaaagcgtgcagggaagagttttgtgattgccgttgatgtagaaaaaggcccatcaagagatgggcaaacaaatcagtaatatttacacacatgtgcttttagcacaaaaatgactatagcattgttaagtaatcaaaaagagttagatttaaatcgattttttaataatttttttgaaaatttataaaccacccgcgtgattatgggttaagcctctgattattaataattaatcataaaattcgtataaaattaggccatttaagatgtcttagagttagcatcagactctctgacactgtttgaatttacagtaggcagtgaatctattgtcctggcactactctctatagtcatttatcagagcctacgtcgctaagtctattagaagattgtgcaatggaaatattctaatgacaggtttcaaccgatagtatttgtgagcactgataataaaaacatgttattaaaaacagtattgacacttttttttaaatccgtaaattagaactaaacagcggcaatgttgctgtttaaattggatagatcaattaagttgaagatgtatttgcgataaaggccacgaagtgtgttgtatgggattgccgattttaagagtaagctcttttaatattggtaatgttttaaggccatgtagtcggtatttgtcatcgcaaagtagtgatgttagcgcgacgatgtaaggccatgatacacaagtgattgtttgcgatattgtttcgtgattaattgagtgtgataatcgcaacgaaagtaaggccacgcatcaagagtctatgtcgcgaggggagtgtacttgtttaagatgctatttttgaattgcatcatcgggttgttagaaaacttaacggtaaacttagggaggttttagtaaaaatcaatacccgatattatctttagtaaacgtgtacatttaaatgtagtatcattagcagtaataatgattaagtccattaatgttaaatattaagtctgtagtaccttaaaagccctgactgcaatggtcagggcttttattgtttatgtctcaatgataagggtctggagcaccccattacgcatgttttggctcaaggaaccttggtggctcatttaaacatcaataaaattaaaccttgcttaataaatcaaaccaggtctattatgttgttatcggtttgtaacacagaccttatgaaagcagttttagtaaagcagtcctcatttcaagtgttatcactagatacccttcttcatgagcctcctcctaagtgcccaataagtaacatgctgaaaaacatgccatgttcgctacgcaagtggctcaaaaaaatgaaaggaagtctctatgtctaacaaaatgactggtttagtaaaatggtttaaccctgagaaaggcttcggttttatcactcctcaagatggcagcaaggacgtgttcgtgcacttctccgctatccagagcagcgattttaagactttagacgaaggtcaaaaagtggagttctctatcgagaacggcgcgaagggtccttctgctgctaatgttatcggactttaattgtcgataatttcgctggcacttacgatagcgatgaaggcctgagcctgagcagataagtgacagtgataaaaaaacccgctttgagcgggttttttgttatagggaataggtaaatcaacgactaaaaatacagtttgctcgctttacttgatctgcagaaatgaaaaaataaagccaaatagtgcaagtccaacgatcgcgaaagccagcaggctcacaagtaatttccaacctatcacctcgcctccttaacatcagtctcttcaacctaaagatcttagtaatatttatttaatggtcaataggagagaggtttttagccgcttgtgagatgtgtatttccggaggttatctttgggtgattttctccatttgtttatcaaaaatcacctgattatcctcgagccctttgagggcagatttgtatttttctgtaattgcagcgtctggcatcagccctttgagtattgctgtcacttccccatcagataacgggatagcgcattctgatccgctaacatttttctttgctgatcgatgatgatcctggagtgttcatcatagtgctttaccgtttcagcggtctgagaggcacctgaaatgctatcgtcaatcatttgcaatatttcagaattcattgacctgccgttcactttggctcgatcagctataaatatatgagcctattgcatacgcaaagtaaaagtgaacagtttatgattcgcttgcccgaaagaatgaaagaagaaattatgcgaatggctgcaatggatggaatttccatcaattcagcaatccttaagcgattggctcgttgtctgagagaagaaagagtctaaaaaataattcattatccaactatcttacaatctcggtgttttaaacatcacgagatgtttgctgtttccccaaaaaaccgtcttggctatcaaaaaataagccatggtatcttgctaccacgcagcagcttatttcgctcgaatggggttagtgatatttttactgttagtctattaagcttttcctctttcgtttggatctcagcccctcttggatagtcgtataatttccccctaaaaatacctactcaaagcccctgttgtaatatggcgttaagcgaaactatattgagttcaatcatcgtttttcccagcctcttaaaggcaacaatgccgttgtgaaagcacgtctctttttgaacgcgcctgacattgacttttatcgggtatgtttgggctcaaaatagaggcattcagttataactcagtataactagtctgtttggggaacggtattttgcatcagctcatcaaaaaacacttcaaatgcggcaaaagcgatgagatgatcgtgggtcttgctagctcaatgctgcatcttattgaaaataatgtttattttaaataattctcagtggctgggtaattagctagaaaatgtattttattgggttagcgattcatattgagcaatttagaacctcatttgggcggttttttgttgttgatatgaagcttttgcagaaatgaatgtccaaagtcggggcttcacgctattttctgaagcccgttaaatcatcgaggtagagagataagttatgccgtcaatcaggcattaactcattgcgggaataaagaagttttttctggatacgataaagaatttatcgccttttttaatttttactccttcacagcaccactctttggcgagggtgaaaaactcgtcggtggtaacgtcaaacgccagctcgatatcgatttcgtcaccgatagacagtaactcctgagcttcactaaagctcttgacctgaaccttactcattaaaacatcccttttatgaattttaagcgggattaacttagccttaattcttgagaaagcctaacaaattagcgattgatagcaatttttgtcaaagtaatgcgggggtaatgagatttggcttaggtttttattaattaatcttaaaacccattgcacgctataagttaaattatttaatttcgagctttgaagtaattttttaaaataaaaataactacccgtgagtaaataaatgcatttttacggtcacgggtaaaatttggctagcaattagcgtgatatttttcgattttttatcgaccagacttctttctcgtgatcttctctgcattcgcagctgcaatagcgggtgccattaagcgagggttgcccacaatcgccgtttttacaaatcagcgaagggggacaggtttggctcggttggcgattgctgcgttgaggtggtgttcaaattcttccattgcttggtcgatgatatcagccattgtgctgcctcctgggttgcttgttatatgctgtctcttccattgcctcgtcataaccgcgttgatagatttcatcaaagatctttctgatgtaatcgacgcggggcaggctcatcgtgtgtcttctcttgattgccataccggcaatatcctcaacgtattcatccatgtaatcatcgaatttgctcatacgaacctcgattctaaaaggggattaagccccgtattaacgaggcccgatgatgttcttttatgatttgctcctctcggccaacatggcatcagccagggcataggatgccgtactcagatcggcgtaaccgttggccgcgctggcgctaccttcggaaataaccaatcccagcatggccttcgcggccagaaaatcgcgtaggctcataccgtcttgtgcgtagttatgctcctccagccagtcgtccttgctgtaagggcggggaaaggcctgaccaccgttgtccgtactcatagttccatcctcatcattgtgtcgacgtaaaatgtgggcgtaaaaaaaccgcgcgaggcggcttaaaggtttttaagtttgtgcggatgtctgggactgcaataccgcattatttgcgaggcgagacggcaaatagcgcgacctgtggcaggcaaaggttatcgccgcttgggtagtagcgcgtttcacgaaccgacagtgccttgtccacccgactgatcggcctgcgtttgcagcttagctcgacccgacttggccgcgcgggtgttacgtccagctctttgctgaagtcattgaccgcgagcgtctgtaaatgttggcgcgcttcgcgacggcgcgtggcagcggttccgttaaaaggcgttctgcgtgtcatacctgtctcctgaatgtgtcgggcactatttatcaatatgcccaggttcaagcggggtttcattggcttttcagccacgtaggtgcgtcaggcaccgttgtaaagagcgggcagcacaggattctatagtcgcgttcttccaggccggtttgaaaataaatattgaactagtggtacaaatttcgcaagaattaaaagtacataatctcatgaaaaattcgtacttttggtttaaattgttgaggggtaaagagatttatttcaaaaatatttgatgtcattggttgaacaaataacgggggaggagtatgaaaatgaacggcaggtacaaaaacccagcagcaaggctgggtttaggcggtatcgttaatctaatagcgcggattatggcagtctgaacttagtctcgacggcgacgccaatgatgcggcaattgccattgatcggaaccatcggccaggcgggatttaaccccttaaggtatttctgattaccgtctatcactaacttcttgaacgtcgcttcgttggcatcggtcagtttggcgatcactagtttgccgttggtggcctctttgccggtgtcaaacaggacaaaggtcccttcaggaatgctgagccccatgggggcggtcatcgagtcaccgtcaaccagtaaccaaaatccctcgccctgaatatgcgcgtcagactcaagccattggtcgatatcttttaggctataagcctcaatggcttcgttccaggcaccggcctggaccttgcttatcaccggatattgggtacctcgggtgtaaggccttgggttggacacgttgctgccttcaccggtgatgattcccagctgcagccagacggggtcaaccttgagaaacttggccagctctgccatgacggcagggcgcggcaacgattctgcgtttaaccacttgctcacgccttttgaagacaaacctgtcgcgcgggataaggctatcccacgtccatgttcatcaagcccagcgtctttacaggcctgcgccagcctctgagcaaattcttcacgcagtttttcagtttgaaccatgagtacgatagtaaaccacttgcaaaaactttcagttcaataataatatgtactgaaagtacgaaaaggaagggctttcagcgtttaattacaaatctgcttagccaccgaagacatcttgctcttttcacaatggacgtactgtcctacgtcgctgcaaagcgaattaatgaatatcagagagttagggtgatatctatcaaggatattgcccgtcagcatgccaatgggatgcattccgtccgtgaagagactctcacactacgcagttaagtactcaacaaaatcgctgaacttcgagccaaacatggcctaaggggcgccttatgaaaatcacctctaccgatttcctggtcatcgacatctattccaaccatgaccgtagctggatctctcgtgtcagcaccgcagagcggtgtgccgcaattatcaggcgcagtgaagaagtggttgagatttatcttcgctgggcacgacaactctagaaggagcaatgtatggacatcaacgtaaaaacaattcccgaccttctggtatcgaccagaggtaatcaggctcaactggcgaggatcctgggcgttagtcgtctaactctcaagaaatatgttaatgaccgaaaggctgaggaacatgccgtgattaatggcgttctgatgaccatcagtcagagggacaaggtaaaaaagttataaagcgggaatacaccaccggcgacatcaagaagattaaagagatggccggtcagtattctccgcaggaaattgcagacactctgaacagaaccaaagccgcattgatggctttcgcaagccgcaacggcatctattttagccgcggacctaacaatcagcacactcaggcgtcggtcaacgaggtagtcagactcaagggcgagggcaagtcctatcggcagattgtggccatcaccggggtaccgatttcaacctgtgcgtattggtgtcggaggcagcatgaagcgaagctggtttctacacgataacctcagcaccgacgaagccgaacagctaatcctccagtaccacgcccgtcatatccagacccgcaagcagcttaatccagaccgtctctcatggtgcgtttcagcctatctcgaagaacgcaggcgtcggcctcagtccagcactcgctggcagagcgcactcgggagactgacctgatgcagtgattcaacgttctcggttgtcacctcttacagataaagaaggagtgggaaaggctcctcaatctcaaggcattaactaaaaatttagaatatttggggaaatatatgagaaagcaagatgcactttataccttacctatggtgttaaaacaggcggatctgcgccgcgtttggtgtcgcggccgtagaactattacgcctgcgcaacgggtatggacgcgctatatgctgtctctatggggtaaacatctcggcggcgatgatgcaccgaccggctgtgtcagcgtgattggcagactgatgatccgctctgaatggagccaggatcagtcggagagaatcattaaggtcgttgaaggtctttataaagaagggcttcgcggcgaggagctgttcaggcgatcgcgtcaaatcgtggtacctggcgcatcgataagcaatattcttgcctcggccaaagaagaggatgacgccgctttcgtggagtcggtcatgcacaaagagattaagcgcgacagtccgattcgttccgtggccatcaaacgttactgtgaacggcgaactgtgcaaaatatcgccaaagatatcaactaccacaccgggtttaacgttcaggcgggtagaaagcgggtgacatggtgcgaagagatacttgaagaagagatgttttttgcgatgaaacgcacaatagagaacactgatacccctaatgtggcctattaagaaatttttatttaaaaatccttgaaaagtgagaaatgaatctgtatatttacatctaagcttggaaataaaagcgaacaacaatggcagcaagggtttttcgtaataaataggcaataagtcattcagttacacaccgtttacgtaaaccccgcagcgaacgaattcagaagccctggcagcaatgcgagggctttttcgtttgcgcgccgggccgctcgttggcatggcggaacaggcaacaggtctttcactttcgttgtgaaaaacagcaaaggctcacttcggtgggccttttttgttccccgtctctaaccctattaatgactaagacgcgaccaaccccggttggaggtggaggccatgaagatgaatcaaaatagtgacggattctggacacactactgggcttcggtaacggcaatcgccagcgccgctggactgactactgaacagtggatctacatattctgcgcaatctttggtgcgcttctgtcgctcggttcatatctgggcaatcgacgtgctctcagtgcccggcaggacgaagaggaaaagagaacggaaattcttcgcacttatctttcatctagaaaagataattctgccgcgcaataacgcctgcgacctcgagagcgattgacgcctcgacgagcagacttttccctctgttttatcaccggtgacattaacccgcgtttatgtcatctcccgcgccgagcttcacgctacccaatggcgcatcaccgttatgcaggcacctacgtgatatggccgatccctcagaaatactcaatgttattgcggctcaggtggccgcaattgtttatcccaacggtacgggctcgcccagtgttaccggcacagtagtcagtatttacgctggctggcccgttcacagcgtgctcgacaccgatatccaggccgggataacgcatatttcggtgtatccgatggaaggcgagcaaaaaattcccaccgcgctagggcggccttatcgcgcggtagactgcggagatccgtcggttatcgcaacggtaagcggcaccgccgtcacgctatcaggtaccgtttcaacccctcagaacctctactttctggtcgatggcagcggttatcattattccgtgcaatcgggtgacacactaacgtcgattgcgacagcaataacaacgcttattccgaacgccagcaacgtcgaggaggttatcagcctacctcaggcgacgcagatagtggccagagtgggggcgtcggtaccgaggcgcgggagctgcgcaggcaagccaaagagtaccgcataaccgtctgggctccgacgacgctgctgcgcgataccctcggtggagcgctggatgaaggattgtcgattaacagcagtttacagctcttggacaacctgccggctttcatgatttatgcacgctcaatgtattcccaaaacacccaaatctaccggcgtgacatggttttttctgtgaactatgccacctcgcaaactctctcggcgccgcaggttgtggcaccggttatgagcatcaacgaccacacccaaaccctctaaatcatcaggagtaatcatggcagataccgatgacgttaacgcgtcaggctctactgcgtccgtaagcgcagattcatcctcggcagcggcagcggcggcggcgtccctcggctttatcttggtcacccgcattgcgtttgccgattatcaggttggcgacgagattaccgatgaggatgaaatcaacgacatcctcgctggcgaactcgccgtttacgtgattaaacgcgccgcataatcccctttattcaacatcagagcccgcctgaagtgggtctttcatttggagatagccatgccgatttatcaagctggcagtttgaacacctctgcgctgaccgcgccagacttatacgtccaggttgttgcaccccagacacagtacattaatggcgttgcgaccgacggcctcggattggtcggtatcgcaagctggggtccggtcaacagcccgttccagattagttcggcaagcgatcaggccctgtacatcggcagtcagcagaaccgcaaatatgaccttgcgacggcggttgccatttctctgcaactcggtgcgaccaacctgaactgcgtgcgcgtcaccgacggcaccgacattgccgccagcgttgctttaaaggatgtggcaagcagtccggcgacgggggtaaccttgaccgcaatttacagtggtaccaccggtaacagcatccaggcgatgattaccgcaggttcggcggttagctcttacaagttgactatttatctgccgggccaaaccgccgaagtgttcgacaacattaccggcaacggtgcgaccttctggacaaatctggtaaatgcggtcaataacggacaaaccagcgtacgcggcgcaagtcaactggctatcgcgaccgttggtaccagcagcgccttgccaaatgtaacggccacttacagcctgacgggcggcaccgacggcgctgccagcattactgatgccgcgctggtcggctccgacggcaccagtactacccgtaaagggatgtacgctctgcgtggcaccaattcgcaggtcatcaacctagtgggcctcactacctccacgctgtggccgacggtgaatacgtttgccgccagcgaaggttcttatgccgtctcgcagtttagcgccggcactacctatgtctcggcggcagcgctgctcaacacggcaggggtagacagctggaacttcaaggcgatggtcggtgactgggtgtactggctggacagcgttaacggattgacccgcatggttgaaccggcaaccttcgaggccgccaatattgccgcgcgcagtccatcaatctctacgctgaacaaagcaatcagcactatcgtatcaacccagcgcaacctggcgaaccagccttactcgctgtctgaaatcggggctatcaactcggcgcgtctcgacgtcattaccaacccatgtccgggcggcaactactttggtatccgctccggccgtaacaccagctcgaccgccagtcagaacgacgacacctatacccgcatgaccaactacctgtcattaactctggcagccagttttggcggcgtagtggggcaaaatcagaccgcagacctgcgtcgcgagacgaaaagcaccattgaggcgtttctgcaaaaccttgacgatcagggcatgatcggcgatccgaacggtgctgcctccttcgcagttaccctggactcgaccaacaatccggattctcaggttgcactcggctacatgcaggccgacgtcgcggtcaagtatctgaacgtcgtacgttatttcctgattaacctcgaaggcggcggcagcgtcaccatcacggtttctaactcagcgtctaactaatcacccttaagacccgccacggcgggttttctctctggagcaagactatgccgcaaaatggatacactcttggccgtgatatcgccgtcgatatcgtcaccgcctacggaactctgcgcattccgcaggtcatcagctttgacgcgaaacctaaagtcaacagccttgaaatcaccccctgaacggcctgaccgatgagctgcttatccctaaaaactggggcggcaccatcgaagccgaacgtcaggatgcgactctcgacgcttggtgggcgcagtgggaagccgattactacagcggcgtgaatcgcgcagcaggcaccatcaccgagactatcgaagaagtgaatggctccgtcagcgtctggcgttatacgaatgttcagatccactttacggatccgggtaagaagtctggcgaccagactgttcgtcagtccatgacctttaccgcacaacgccgcatccgcgtatcttgattgagagaaagaaatggcaaagttaaacgtccacgaaacgaaagatgaagacctgaaacagcctgtggaagagggcggcactgtgaccgacgttcggggtcgcgtgattaaaattcgcgaactggatgccgtgcaggaggcgcgcgtcttctgcgcagcgggcgcggaagacgcagtaaatatgccttacatgaacatgtacgtttttcctacggcgcgggtggaggaaattgacggtgaaaaatatgccgttcctaccaataagctgcagataaacggcatgctcagtgtgttgggaaaagccggattaaatgcggttcaggagtttattttccaaaaaattggcgaagaaaatgccggtcaactggatgacaacgccgcaaaaaactagcccagaaccccgagtttcgcaatcaatgttggttgatgaaaaacggggttcctttccatattgtttttaaaataaccgagcttttgccgcatgaaagattcgcgatggcggtcgtctttagcgaattcgagggcaacaagtttaactggacgacgaaacagtttgaggagtcgggctgatggaatcggctaatttaccggtaaagcggctgactcctcgacctgcatttcaataaccccggcccacatgctggggtttttcattttttaacaagaggttgtctatggacgtgagggcttatcaagatgcggtgcggcaggctttagatgaccagatgacccacagtatgatgaacttcagtcagcaagcgaagacgctgaatgagcggttcattcagatgacgaagaacatcaaaagcgtttcaacagcggcaaaagatgcgcaaaaagtcctcagcggtatgagtgaggcgatgaagaatcagttttccaacgctatcaagggcgcaaaagattatgcctcggcgttgaaaatggtcaccacccatgcgcgggatgcggcaaaagcgggtacagatcaggccaaaagcggcgcaggaaggaaaagccgtaggggcaacaagaactcagagaggtcaggccacgaagaagaaaaaaaatcagatgatgacggtgagtccggactagagaaggccaaaaagctttacgaggttttcagtcaaatcaacgccacgggcgtggcctaccaaaagctgctggaggggttgcgggctcgaggcctcgatgatgctcaactgagccaggcgaacgatttcgtttataccaacaacattcctgatacctcacgcctggaccggatgagcattctcgccgatgctcaaaatacgtttaacgcggacggtctgggcaagcaaaagtctctacaggccgccgaggtgatgatgccagtgttggcacgttacgacgtcgcctcgaaaatgcttgatgatgcctatgaccccttaaaagaccccaaccgcggagtcattaataaactcgtagaatcaatgggcgcgttaaacgacccgaagcgggcctctgagatagccgatggggtgtttaagtacactcagggtacccatcagacaatcgatcaaaagaaatttgaggcattcgtcagcagcaatagcccggctacacgcaggcaaaatattgcctctctctttggtgtgcttgaaccggtgattgacgacatggggggtgatgcggccgcctctggaatgcaaaaggcggccaatcatatcaacggcaaaatggcgtcggtgccgaaaaaccttcgtcaggagcttgctcgtttagacattgccaatgccagcggaaacggacagacgcagactctgagtgacctgcagtcctcggacattgcccgctacacccagaagctgatggccatctatgccgctcacggcattaacagtgccgccgacaggcagcgtgaaaacagccttctgtttggcagctcgggtgcgaaagtttatgacaaaatcatggagtctgcctcaagacacagccgggatataacagcgttaccggtattgcgtcagttctcgactctccgcgtagtcgcgtgctgatggcaaaagaccaggttgccaagaaatatcaggatatgcagctcacgattgccgataaaggaaaggtcacggacatttttgctaagggggaagatatcctctccggcgccatggctataggcacaaactttatggacaagcacccgttattagcctcaataggcaccgacgccaccctggcctatggtgcactttccgggctcaagggcggttggtcaatgctgaagaaggccgcaggtgcactgggcaatccattaaagttactcgaaaaagtgggcggcagagcagcattgaccacggcggccgaggcgatacccgaggccgttgcaatgataggcggatggccggtaattgccgcgggtgccgctgtggcagcgacgggtatggcggatatcagctctataagcacttcaatcaagacagtcctgcaggcgagccgttaaacgccgttgctagcaaaggggctgcggactttaatgtcagcaatccggatgcggccgcgcagtaccgccatctgattaacccaggccaatatcctgcggtgcctccggcattttcctctgccgcgcctcagccggtcaatttgctgcttacccacgaagggcgtcaggtgcttatcgcgaccgttatcggtggaataagcaaagaggcctccaaaccaagaagcggcgtcagcggtttcgatccttcacagctgtttttaccgcccggctcggtaagtaaactggccaccaattaacggagtttttatgtcggtaataagcgtgctgaataaattagccccggcgacagaaaccaccacgacccgcctgaaactcgggactttcagtttaccgacttcgaagtgcccgagcgcctgtcgatcccggctaaacagaaaaccgtgatgcaccaaatgattggcggcaagcgagtcgtcgacgtgcttggcgtggagtacgacgcgtttagctggtcgggcacgattaccggggccaatgcgggggatcgggtgaccacgctcgaacgtatgcgtgacgctgggaagatgctgaccatgaccctcgggacctacagtttcaacgtcgtgatcaccgcctttacgccagtgttcgagtttgtctatcgccgaccctacacccttgaggtggcgatcgttgagcgtactgacgcgccggtccgcgccgataccctgaccggctcccttaatgcgctcgttaacagcgatctgggcaaggcgctggatctcgccgcggtggtcaacgcctcatcggttaaagatgtgaccaccagcgcgacttcggcggtaagcggcgtgacgtcggcgatggccacggtgcagtcggcggtcaatcaggtgactgactttgcgcatgcgaccattgataccgtgcaaacggtggtcaggccgatagtcgccgcgcagaaggtcgtcagccaggcgattacgcaggtggaggccgaggcgaccaaaatcaccaccctcggtgggctggtacctgggaatcctatctcaaaaaccatcaccaacttactgagccaggccaaaacagcgacccagctcccggcgttatatcagttgcagagcgtgctcggccggttgagtaagaacgttcagtcgggccagaccgccgacggcgttcgtaccattacccactccggcggcaacctctttcaggtggcatccgagcagttgggtgacgcctcgctctggaccgcgctggcgacggttaaccaccttactgatacctcgctcaccggcatcaatacgctgatcgttccttcaaacccgacgaacgaccttcaaacgagctaactatggatattaataactcgatagtgacgtccggcgtgcgaagtatcggcggtcgctgcctgttaaacggcgttgaggtgccttttgtcacctttgacgttgaaagtaattccttccgttcggcctctaccttcaacctgacgctggcaacctctgcgcttccggatgcaatgggactgctcaattactggtccacgcagaccaccatcaaggtcgagctctcggtcaagttggtgacgcagtccggtatcgacgagaaaaagctgattgtcggcaatattgatgattgggattttaatccggcgcattttgaaattaccgccagcgggcgcgactataccagcctgctgatcgacgccaagtcggctggagagagtttcaaaaactacaccagctcgcagattgccagccttttggcgcagcgccacggattgaccccgatggtcacggcgaccaccggtcgctttggtgagttttatcagattgattcagcgcatctgaccggcgaacagaccgagtgggacctgctcaatacgttggcgagcatagagggatattcggtctacgtggaggataacagcctctattttcagccggcgcctgaccccgcgaaagccgacaactacgtgattcgttggcagccgccggggtcactgacctacccgcagtgtaatctgtctgatgacctgcatttcacccgggcgctgacgattgcaaaaggcgtcaaggtcgaggtgaagagctggaactctaaacgcaaaaacaagcagtttgttgccacctaccctaagacctcgacccaggaaaatccgcaggtttacaccatcatccgtaacggacttaccccggagtcagcggacgcactggcgctctcgctttataagagcatcgtgcagcacgaaatgaagtttaccgcctcgacggcgggggacaatctgctcaccccgcatacgctggtgcgtattgaggggactcaaagcccgtttgaccagatttattactgtgacagcgtgcgccggaccttaagttgggattcgggttacaccatgtcaatttccggcaagaaccatagcccagcactggatgtctcctcatgaaagcattaatgaacgcgatggcgagccgagccatgcaggcgagcgccggggataccggcacgcggcagggcatcattactgcctacgatcccgccgcctatgccgtcaaggttcaactacagcccaccggcgaagaaaccggctggataccgctgcaatctccgtgggtcggcaacggctggggccttgtcgccggaccggtgattggcgcagtggtggtcatcgaacccgactctttcaacatcggcaatggcgtcgtggccgggcagctgtttaacgacattgaccgccccctgcggtgccatcgggtgagttctggctcgttcatcagtccggttctttgctgaagttcaccaacgacgggcaggtgcgggtcagttcgacggagaaaattacctataccgcaccggcccatcactttatcggcggcgacgtgaccgtcgatgaaaatctgattgtggtgaaagatatctatgaccagaaccaagcatctggctcggtaaagacccttcgcactacctataacggccatacccatcacgagaacgggcaggggagtaataccaacggcccgaaccagcaaatcacctaagcgggaaacccatgaaggatatttatcactatataggcggtgacctaagcacctcgccgacgggagacctgcgtcccgtggagagtacgagcgcggtaagcagagggttctcaggcggctcatgaccaatccgggggattatatttttcaccccgcctacggcgccggcctgggccaaaaggtcggtgagtcagtcaacatcaatgaatggaaagcgctgatactcggacaaatgcttctcgaggatgcggtggcgcaggatccgaccccaccgtcaccctgaccattatcgaacagggcgtcagcgtctacgtcagttacaccgacgcaacaaccggtacccctgcaactctcagtttcgacgtgacgaggtaatcccgtggctctcaatataaaaacattcgcaacgctggtcagcgatcaggtgaccgctttacagggcgccgccgccgggctggtggataccgctatcggcagcattcttcgctccatcttggaatccaactcggcggtggcgatatggatacagcaacttatcgtgaatcttctggtcaccactcgggcggcaaccagctctggcgatgacctcgacagttggatggccgatttcagtttcactcgtcttgcggccactgcggcaaccgggcaggtggttttcagccgctttacggcgactaatcaggcggtgattcccgtgggcactcaggtgtcgaccaccgacggctcacaggcttatttggtcaccaccgataccaccaatgccgcgtatgacccgacgctggccggctacctgatagccgctggcgtcacttcagtgcgcgtgccggtacaggcggtgacggcaggggcggcggggaatgcgctggaaggtacgatcaccgtgatctccggctccgttcagtacgtcgataccgtcactaacccggtgacctttggcactggtgaggacgccgagtctgacaccgattttcgcgcccgcttcgtgctgtggatagcctcactctctaaatctacgctgtctgcaatcggctacgcgctgtcgagtatgcaaaacggtgtgacctacaccctgaccgaaaatcagacttacagtggcctgtcccagcctggctatttttatgccgtggtggacgacggaagcggtgccccgtcaagtacatttctggggcaggcatacagcgctatcgatgcggtgaggggtttacggtcacgtttggggtttttgcaccggcacgggtgacggcaaacatcgccatgacgattaccttgagtgcgcccgccgtgcgcgccgaggtggtcgcgttggtggatgccgcgctagaggcttacgttgccggattagcgctgggtcaaacgcttcccttcacccaacttgccaccattgcctacggcgcaagcccgtatgtgaccaacgttaccggtgtcatgctgaacggaagtttggccgatgacttaacagcaaccgccagtcaggttatccgcgctggcacaatttcggtgagctaaatggcgactggcgactctcaagatatgttaggccgcctcaaggcgctcattccgccgacgtggtacggggacgacaacccgataagagacgcgatcctgaccggctgtgcatcggcgctttcctggtgttactcgctttacctgtacgccaaactgcagactcgaatcaatacggcgactgacggctggcttgatatcgcggcctatgattttttcggtaaaaatctgccccgttctgcaggccagtctgacgatctttttcgcaacactattcgcaccaacctgtttcgcgaacgcggaacgcgccagtctatcatcaaggtcctcgaggatttgaccggcaaagcgcccgatattttcgaaccctcgcgacctcaggataccggtgcctataggggagcgagtctcggttatggactggcgggcggatacggttcgattttgattccctatcaggcgtttgttaccgcgtatcggccagacggcgcaggtatcccctttgttgcgggttacagcgcggtctcggctggatacagcgatgcctcacgcggtgagtatgcttcgacgggaatgattagcggcctgataaccgatacgcagatttacgaggcgatcgcctcggtaaaaatggaaggcacgctggtgtgggtcaaaatactctcacaccgtgccgacgattactcacaactagggatagactttattaccggtgagtcatcactgctcgagtatgcgcaatggtagcgcctccggtcgtaacaccttccctgaatacctctttccttccattggagaagcacaatggcatttattgatggtcaacttcttactgcggctcaattaaacgatttagccaacaagtccgacctggactcggcaatcgaagccaagattgatgagataaacggctataacctaagcgccgcccagtcggcagacgcggcggcctcgaacagtgcctctgcacaaagcgcggtggcacttgcccaacaggccgcggccgaggcgctggccgcagaggacgtattgagaagcgaactggcggcaccggccggagccggcctttcaggctaccagataggccagacgtatggggctaataccgtcggaacaaagctcaatcgcagaatcgacattgaggattttgccgatgaaaactcggaagccggagactggacaatcgccattcaggcggccataaaccagtcactaattgatggcagcgacgtctacggacggggtaactacaccatttcgaatacgctgaaaattgccggttttgcttcccagggattaaatttatacctcaattcattgagcgttaactcggcattcccgaaatgcgatagcttctgggacagcccaacgccgatgatcctaattggtgatggcggcgcaaacgtcacgggattaaatatcaccatcggtactttgcacggcggtatttataatgcttcaagcggtgacattgaatatattgccgacggtattaaacctaacggcaatggttttgccctgtcacattttcacattggatacgcgctttactgttacgccgttattcgtactggtgaccagcttacgccgaatgcctcgatgtggattaccggagatttctggacgcaaaactatcttggcgtattgatgaaaaccggtacgggcagcggtgcgccgatcgtcgaagggtggaagttcttcgttaaatttatcgccgccaacaactatggcggtatctggttcctcaactccgggcaatacgctcaggtgaacggagactttgacttcaatggcggctggctgggcattctgcatctttctgataccacttacgtcagcgagctggtcggaaatgccggtgaaatgctgactgacggcacgactcaactggcctttatggctcactacacttatcagggatcaaattacgtcatcgtggctgccgatcggcctatgtcagactacggtggcggcacaggaacctttccatgggctgcgggaagcacgatcaccagcgtaaaagccagtgatatcgccattaagttcgacaaagcgatgcttgcgggagacaacgcgtcatctaacaacttcatcgatatcatccacgatttccagtacaccgcgttcggtaaaattcaggtagtagctggttatctggcgggtgtttatggtgggttacttcacagctcggtatttctttaccagaactcgttcgacggcgttacccaaatcgttgacggcatggcggtaagcaactccggaacgacgctgtccttttataacaaaacggtatccgattcaccttactccaacataaccgctgacttcgtcaacttcgagaaaaggctttatctcaaagatcatacaacaatcggcatcaacacctatattgccgttcctcgcgccaccagtgcggatgacttcacgactattctgccgcttacagatacctccacggataaatacggtgaggaaggttctaagtggcacgtcgagataatctctaactactccggctgtggcggttcacacgacgtctacatatggggagtcggaaatgccagggtgactaaccagcagcagctcggctatgcctacgaatggcgctatatgcaacaggcgaatgcggacggtacggcgattagtggcatcaacctgcaaatccgccaggattcgcaggacgtgattaaattttcagtcaatatgacgaggataggataatggcagatacagtgactcccaccattgcggcatcgtcgaaagacgtttttaatgctagcggtactgcgaccagcacaaccactttgcaatcaatctaccaggttcctgtctatgttaatgtcccgatgcttaatgccatgggcgttgaaatcaacggaggtgattacgctccgatctgggatatgctcagcatcggtgggcgaattacccaggaccctaatgcggatcaaaaggtggggccgggcgttcttgccgagatgactatttcagccatagatacgaccattgatacctcgggcgaaaccgccgctgttaaagcgatttatgccaatcagaaaattatagccgataatttaacggcaatcgttcaggctattaatgcccaccgtgataattattctattctccttcaatatatgatcaactataaattattgaatcctgcatcctcttaataaggagttttatctatggctttaaccggttccatcaccattaattcccaaagcttgccagatgcctatgtcgtcgtgagctcaattaccttagagggaacaatggcgcaagcaatgttttcgctttatgccacagtaggggcatatatagcgggcgcattacctattatcacttaccctggctatattccttactcaatgagtcaggtccctttagatgtggtagaaacctctacctatgtagcagggttattccccggttttacgcgcgtgacaaccgccgataagacttcagtgagtagcgtaaccactgacagagcagcaattctggctgctgcgcaagcctcggcagctgcggcaaccagcagttcagcgtcaacgtctaccgcaacgaatacggcaacgagtgatacctcaggcaccacagtgagtgcatccagttaattttccgcagcctgttaatcctctctccttatatattttttcctgaagcctaaatcatgcttatttctttatggagttaaaatggatcgtcaaattgtctatcctggtgcaattccgcttgaaacagatttgttaaatactaataaatatgccctgataggtttggctaaactctcagcatcaattatgggggaggctacctatctcagaggtctggaatgtacgccaaccaatccggcctcaatgacaataaatattgcaaaaggtgaaatatatagcctgcaaaacactgatggaacggcatattcatccctcgcggcagataccactaattctattctaaagcagggtattattctttcctctaccgcattgactttatcggcaccgactgttgcgggtcagtcgattaattatttagttcaggtggcttacagcgataaggattctggggctacggtcctaccttattacaacactacggatccgacggctgcctatagtgggccagcagggtcaagtgcgacgcaaaatacggtcaggtcaggcatttgcaccgtaggtttgaagcagggtgtcgcggcggtgacggggactcagtccacgcccgcggcagatgaaggatacactgccgcttgggttattaccgtggtgcaaggtgctacggcgattactgctgccaacatcggcgtttcgccaaacgcgccgttccttccggccaacggcctggttgatggagggcagaaaaagaccctgacgcacgccgtcgatttcggctcgaccaatgcctatgcggccaactacatgcctgccatcacctcgttaaccgacggcatggagcttaccttcaaggcaaagaccagcaatacgtccagtgcaaaacttgcggttaattctcattccgcctttccgttgttaaatatcgctggcgcaacgctgagcggagggaaatcctctccggcggtttcgccaccgtgaagtggaatgcgggtctgagtgcatggatgcttatcaattcgacaggcgtaggtgccgctctgactaacctcggactggggtctacaacccttaaaggcggcctggtgggtacgcctagaatcttcacggccagcgcgacctacacgccaacaccgggaacccgactggtcaaacttacgctgactggcggtggcggcggtggcgcgggcgcaaaagctacggcaacctcacagtccttctccggcggcggcggcggcgctggcgcaaccgtgattgcctacttcacgctgacgggcgtgagtacgtatgccattacggtcggcgcaggaggcgcgggggctagcaatacgtctgccacttctggcggaatcacttcatttgccggtttatatacggccgcgggtgggcagggggcacagtttgggtccgcgactagcgcagcaggaggcgcgggcggtacagcatccggcggcctgatcaacattaatggcggatatggcagtgacggtcagtctggaactttcctgttaaccggaagcggcggcaactcttactgggcggaggcgggcgtgcagctaacgccaccgcgggcgttaccggaatggcctatggttcaggtggtggcggtgtttatgatagcggcttaaccgggactgccttcaccggaggtgcgggcaagtctggcatcgccgtcattgaagaatacgcgtaaaggctactgcgatttatcaataataaaattggagaactcaatggatcgccagatagtttatccaggcgcagttccgcttgataccgatctgcttcacaccaataagtatgccatgattggcctcgccaaactctcggcagcacttatgggagcgtcgacttaccttcgtggtctggaatgtacgcccaccacgccgacctcaatgacagtcaatgtggcgaagggcgaaatctacagcctgcaaaatgttgatggaacggcctactcctcactcgaagccgacaccagtaatactattttaaaacaaggccttcttctttcctctacgtcgttcacgctggccgcaccgtcaggcaacgggcaatcgataaattatcttctgcaggtcgcctacagtgacagcgattcaggggcaacggtattaccttactacaatgccgccaacccggctgtcgcctacagtgggccaggaggcaacggggcggcgcaaaatacggtcagggccgggctatgtagcgtcgcgcttaagaccggtgttgctgcgacgaccggcacccaaacaacaccagcagcagataccggatatacagcagcatgggtcattaccgtggctcagggcaccacaacactgactgccgccaatatttcggcgacggcgacggcgccattcctgccagcgtcgggtctgatagccgctctacagcaatgcaccatgacctatgcaattgataagggcgcggcgaatgtttacaccgcctcctttactccagcgttgcccacgctggtggacgggatgcgcttgactttcaaggcgaaaaccgccaacaccgccagttctacctttgcggcaaatggtggtacagcctacccgatttattcgcagcttcacttggccttgcagggaggggagatagtcgccaacggacttatcgaaatcgaatggaatagctcgttaaatgcctggatactttgtggcaatagcggcggggcgttgccggtagttgcgggcacgaaatcaaaccatgcggttaaccttggacaattcaccagcgggacaggctcaacaaaattacctgatgggactattattaactgggggcgaggcacaggtgttacgacatctgcaggagtgagtatttcgttccaaatcccattctcaaactcgtcgtcttattccgtatcgggccaatcagcatcgggtccaggctcagtaagctgtattcacgccagctcattcactgcaaatggctgtaatatttcggtcactacctccaatggaagctctactgtttattgggctgatcccttcacctggattgccattggccgctagtttgatgaagagccctcactcgggggttctttgcttttcattcctcctcattcagcgcgtactccctgcaaatttgccgcataaattctccctttctgacttacttcccgatttttatactccgatatcagaattttatttacatcttttcaaagacagtgctgttgaagcctaatactcagaccccattgagcggtcatcaggcatgaataaaaaaacccaccggaaggtgggtttttattttatacataaacttaatgatgtagagacaggttgttagaggcctactctgaaaggttttttcgactttttagccgcttcaataggatctgctgctgctagccattcttcgaatcgcaaataagcttcgataaatttaacaaaatagccaacgtcggtcatttgttcagcttggctatccatatatttggacgcaagtttgaacgcatcatcgttatctaatttcatggattttctcttgagttattgaatgcgtaagaaacattcagcataaagcttactcaatcttaacagtgggtcaagtaattctaataaagttatacaaatcaaagatagtgataataaaaaacccatcaaatgatgggttttagccaatggtacatccatgtacgttataagctacgctgtgctttataacgttaaatgagcttatggtccgcgatggtagtagccaccaccgccgtgatagccgtggtcatggtgataatagccaggccagatacagccgtttagcgaaacaacgactgcaagaatgctaagcatctttaatgtatttttcatgccttacctccatttctttaataaggtaagtatccggcagtttccggatttaatctatcaaccttatcctaaaaaaataagaataaaaaaagcccaccaaggagacgggcagaaataatatctaaaatttacacacataggctaatgatagcggttgtgatcatatcctcgcgttattatcgccagtgtaggaattgtgtaagcgttcatcaaagacacgagattaattcatgccattgcaggaggcccaaattcagtgatccagcttataaagctgcgatgtttggcgctaaagtgcaggtcttgtggccaaatgaggtgaatgggccgcggcgcaggtaaacagtcggccaggagaggtttaagccttcccgccgcaatgtcttcggctaaaagcaggcgaggctgaaaaatcaacccagtaccgcttagtgcagactgccgcagtgcttgcccatcgttgcagctgaacgtcgcactcgccggccatattaaggcgtctccgctgcgccaggcgttgcgtttgttccagttgctatagcgcaggcagcgatgagaggctaattcctcaaggcttcgtggttcgccgtattgtgcgagataagccggtgagcccgcgatagtcatctgatagtctcccagacgcagggcaacatgaggcgtgtcgaccggcaaatcgccgatacggaaagcgaagtcaaacccctcggcaatgatatcaacgaaacgctcgctgagatcgagctcaatcacaacgtcaggaaagctcaactgaaactcgctacagagtctggcgatggcacaactccccagcgttgtcgacgcggatatccgcaggcttccggccggaaagcgtctcagactggcaatacggctttccgcactgcgcagggcagtgagtacatgcaaactctcttcgtaccaggccttaccggcctgcgttagcgtctgtcggcgcgtattgcgttttagcaaactggcctgcaaatgggtttccatttgcgccaccattttgccgaccattaccgaggagatatcgagccttttggccgcttcgctaaaattgcccgtctcaacgatcgccacaaacacttccatccaacgtatcttattcatgattactaacttttagttattaatgtgtaaattatttgcgcatttttctcctgattgcaacgtgtcagtatgaaatctcattcaaagaggagaatacgatgaaagtgatgataattggtgccagcggcattattggacgtgcagtggcagaaaatctcgaaaaggatcatgaaattattcgtgtcggcaaaagccgtggcgatctgctggttgacctgaccgaggagtcaagcgtgaaggcgctgtttgaacgcagcggtaaagttgatgcgattatcgctaccatgggcagcgttcattttggacccttggcggagatgaccgcagagcaatttaaccagggtttacagaacaagctgttggggcaggtcaggctggtgttaataggtaaagaacatcttaatgcgggcggttcatttaccttaactaccggcattttgacgcatcagcccattcgtaccggtgtgaatgcgacggcggtcaatgcggcgctggagggatttgtgcttgccgccgcgaatgaacttgcaggcctgcgtattaatgcggttagcccaaccgtggtgaccgaggcgctggataaatatgcgccgtttttcccaggatttgaaagtgcgtctgcgagccgggttgcgctggcctatcggcgaagcgttgacggaattgataacgggaaagtattccgcgtctggtaacttgccgtaaacgaaaaaggcctctcaacggagaagccttttacgcaatcgggtatggcctgacctatcagcgcgcgaaaagctcgcgacgtcgggtttttacgaactgggcaatcacaaccagaacggctatcagcataaacacgccgaagacgccgactaaccactgtggcatgctcaagttgaacaaagtccaggatcgctctgcgcagtcaccggtggcaacaaagacgcttggcagccatttatccagcggtaacccactcgggaaacgggccgcaaagtcgcaggtcgcaaaaggtgacgggtggagttggatcatggtgtgctcccacgacaggcggataccttcccaggcgctgtaaatccaaatcaatattgcgccatagcgcagccaagttttcggggcaattgcgcccaccaggcctgcacccataatgccgaacagtgcgcagcgctcataaatgcacattacacaaggttttagcaacataacgtgttggaaatagagcgcaaccaactcgaggactaacgcggtcagtgccattaagagccatgcgccgcgcccctgcgagcatcggttaagatattgcaacataggtttattttccatgcagtaagctatcgactggcagtgtaaaccaaaatatcccaagtgccagcaggttaaggaaaaattccgccaaaaagagcatttaagtcgataatctggcgatttttattaatatgaatctaacctgtgaaacagtgcttaaacatgactaaaatagcgatgaagcatcttaatgattgaaaatacataaaattgcaaaggcatgcacattttcaacatatcgactaaacagacgctataacctgtgattttcatctggtatgatgagccgaattataacttctgaataggcagcttgtagaagctgtaacggaaagccacaaacatggttattaaggcacagagtcctgccggttttgccgaagaatatattattgaaagtatttggaacagtcgatttccgccggggtctattttgccagcagaaagagagctctctgaactgattggcgtgacccgtaccaccctgcgtgaagtgttgcagcgtctggcgcgtgacggatggttgactatccagcacggtaagccgaccaaggtaaacaacttctgggaaacgtccggtcttaatattctcgaaacgctcgcccgcctggatcacgagagcgtcccgcagctcatcgacaacctcctctccgtgcgtaccaacattgcgactatttttatccgcaaagcgatgcgttcgaacccagaagagactcaaaaagttctggccaaggccgaggttgccgacgacacctcagaagccttcaccgaactcgattacggcatcttccgcggtttggcctttgcctccggcaacccgatttatgggctgattatcaatggcctgcgtgggctttatactcgcgtaggacgttattatttctctaatccagaagcacgtaagttggcggtcgatttttacaagacgctgtcaaacatctgtgaagagaagcagtttgatcgcatcgttgactgcgtacgcagttacggtaaaaacagtggcgctatttggcacagcatgcaaagtggcgtacctcacgacctgaccgatcagcgtcgttgagagaataagcactgattaaacattcaaaagtaacaataaaaaagggcgcctcggcgccctttttcaatggagcaacgcttaaagagcggaagggcgcggcgggcagcgttcgagcatttcgatgctaccatcctcgttcaactgctccatgtagacgtcgaagccccagaggcggtgaatgtgtttcattacctcacggcggctcttgtccaacggggctcggtcttgcggaatgtagcgcagcgtcagcgagcggtcaccgcgtaggtcaacgttccacacctggatgttcggctcatggttactcaggttgtactgcgcagacagctcctgacggatggcccgataacccgcctcgttgtgtattgaggagatctcaagatagttgttgtgatcgtcatccaataccgtaaacaaacggaaatcgcgcatcactttcggtgataaaaactggctgataaagctttcgtccttgaagtcgcgcatcgcaaaatgcagcgtctccagccagtctgaaccggcgatgtccgggaaccagtatttgtcttcttccgtcggcgactggcagatgcgtttaatgtcctggaacatggcgaaacccagcgcgtaagggttgattccgctgtaatacgggctgttgtacggcggctggaacaccacgttggtgtggctgtgcaagaactcgaggataaagcggtcgctcactttcccttcatcgtacagatgattaaggatggtgtagtgccagaacgtcgcccagccttcattcatgacctgcgtctgtttctgcggataaaaatactggctgattttacgcacgatacgcaaaatctcgcgctgccacggctccagaagtggcgcatttttttccataaagtacagcaggttttcctgtggttcggaagggaagcgacggacctgctccggcgcatcctctttgtcgcggcgcggcagcgtcttccacagtgtgtttacctgactttgcagataggcttcacggctttgctgacgtgcggtctcttctgccaaagaaattttttgagggcgtttatagcggtcaacgccgtaattcatcagcgcatgacaggagtcaagcaggcgctcgacttcttctacgccatagcgctcctcgcactggctgatgtagcgccgtgcaaagataaggtagtcgacgattgagctagcgtcggtccaactgcggaacagatagttgtttttaaagaaggagttatgcccatagcaggcatgtgccatcaccaacgcctgcatggtgatggtattttcttccatcagataggcgatacaaggattggagttaatcacaatctcgtaggccaggccctgttggccatgtttgtagcgctgctcggtttcgataaatttcttaccgaacgaccagtgcgtgtagttaataggcatgccgacgctggagtaggcatccatcatctgctcggaggtaattatctcgatttgatgcgggtaggtttccagccgataactcttggcaacccggtcaatctcttccagataaacctgaagtaattcaaacgtccagtctggtccatcactcaaacgtttgtcttcagttttgtgttcctgggtctttgtcgtcatcagcgcaccctcagtcagttacggacgcaacatagtttgagaaaatatgcatccactgctaatcgtagttcaatcttaaccgtgcatcatgtttttcaagacaattttactgcgttaacgatttaatgattgtttccggggccacagagggcgcgaatattcgtccctctgtttcaattaataagccttccgcgatagggtgtcaatcaccctgcgcaccttctatccataaacatcttttataatttcgagggggcgacacaaatcggtgtgcggctgcgcgaggcgaagacaagatggctcgccagcgccagcagacaaacccccagcgcgccatacaacaggacgttgctaaagcctgcggtaagcgcctcgcgtgccagcgccgttgagacgaatggcgtgtctggcgcgcccacgagctgctcgccgccagcaatacgctccgccagcgtttgccagtgtgcagcatcgagccgagcgggcaacttatcacgcaaataatgaccgatgccggcaaccagaagactgcccataaccgcgatattgatggccaaggttatcaatcgcgcactcatgtccatccctgacgccatccccgcgcgactgaccggtagtgagccggtagtgagccggtagtggtgtgcgtgacgggtgtattggtcagtccgagcgcggcaccggccagcagggcaccgggcagtaatccgaacgcctggctgatgccgactctcatcagcagaaacccgatgccgatgccgaataagcctgcgggaataattctggcggcaccaaagcgatgaacgagtcgtgctgcaaccggcggcatcagcagcgtgggcagggtataggcaagcaggtatccgcccgccgagataatgtcaaagccaagcacgctctggtaatagagaggcaggtaaatcataaagggccaaaagctgaagttcatgccggccgagcccaataatgcgccaaagaaagaacggttcttaaaaaccgaaaaatcaaacatcggatgcgggtgacgccgttcaatgatgacaaagataatggcgcaaagtagcgcaccgccgagaatgcttagggcgtttaagctgctataacccatctgcccgccctgagtaatatagaaggtagcgcccagcactgtaagtgacagcgtcacgagtccgccgacgtccagctttttatcctccgtgtcacgcgactcgagcacattgctgcgagccagtaaccaggttagcatcgcaataaaaacgtgtaccagaaagacccactgccagctggcctgcgtcacgataatcccaccaatcatagggccaaatcccagaccaaagccaaacaccattccccaggcggtaaaggcgcggctgcgggctttaccctcggtaaactgcgacgagaggatggcaatcaggcaaatcagcatcgcaccgccgcttaacccctgaagaaaccgacccactatcatcaccgaggccgtttgtgcgacgccgcacattaatgaagtgacgccgaagccgataatactgataagaaagagtcgcttacgtccgaagcggtccgctagcgtgccggtcgccatcagtaccgtggtgcaggcgagagtataagcattcatgatccattgcagttgggcaaagctggcccctatctgcttttccagaattggcaggatgaccggtacgctggatatctcgagtccgctcatcatggctgcgaggcatacggcggttaatgccaatctgtttttggtggtcggggaaacggccataagaaagtcctatgtcactttagaggcagccagcatgaaagatctgctccgcgctggaaatatgcgcccgtgccatatatcgtcaatattatgccaacttaaagagtgtgatttatgccaactttttcaggcgcgcctgcgttgaatcgacgcctggtgcttctcgcttatgaatgcctttgcaccttcgagtttggtaccgccgtcgaagcctttggccgtgctgatgaggtcaccggcgaaccgctgtatgagatggtggtggcctcggtcgaaagcggaatttttagcgcgcagggtgggattcgcctcgtcgtcgacggcggattagagctgctcgacggcgcgggcacgattgttattcctggttggcgcagtattgatgaaccgccatcgccgcagctgattaccgcgctgcaacgtgcccatgcaaacggctcgcggatagtgtcaatttgcgcgggcagttttgtgttggcagaggcaggattacttgacggaaaacgcgccaccgcacactggaatagcaccgaagcactggctcgccgctatccgaaaattcaggtcagtcatggcgttatctacgtcgatgagggcagcattattacctcttcgggcggtgccgcaggcgttgatttatgtctgcacgtcattcgacgtgatttcggggccgaggtcgcaaatcgcgcggcgcgcaggatggtgacctcgacgcaccgtgagggcgaacaggcgcagtatcttgcacagccggtcaccgcgcggcagggtaaaagtctctctccgttgctcgacagattacgcgcaacgctcgacaggccgctggctattgccgagctggccagcgaagcgggaatgagtcgccgcacctttcttcgtcgttttcaggagtctaccggtaccagtccgggcgagtggatgctggggatcaggctgcaaaatgcctgtcgattgctcgaaaatccgacgttgagcatagagcacgttgccgagcagtctggttttggttcagcggaaacgttacgtcatcatttcaggcggcgtttagggaccacgccaagcgaatttcgccggcaagcctaggcgagagtttgtcaggctgtgccgtgttagcagagtattagaattataattctccaaagcggcaaagccacgttagtcgaagctaaaacagagaatcttcctttgctggtttttattggagtaatattctgattttaccccaaaagtgcagtgttaatgcctgtttattgggtcggtgtttctggctcagagttgagtgatagcaatgatagcattgctatcaaaatccgtttaatttcttccaatcagcatgaaatgttgcgttatatcgttatttaatcgcccctattgaaaagttattcagtttcaacgataaatgtttgtgaaattcttcacaattctggcggtgaaagttggtatcttgccgctgtcaggttaacttctgcgccagaatattatgctttatatggcgtcaaactggagtcgagtatgcgagtggtgattttaggcagtggtgtagtgggtgtcgccagtgcgtggtatctggcaaaggccgggcatgaggtgacggttatcgatcgtcaggccggcccggctgaagagaccagcgcgggtaatgctggacagatctcacccggctatgccgcgccgtgggcagctccaggcgtcccgttgaaggccgttaagtggatgttccagcgccatgccccttggctattcgcctcgacggcaccagtaaccagctcaaatggatgtggcaaatgttgcgcaactgcgacatgcgccactaccagactaataaaagccgcatggtacgcatcgccgaatacagccgtgactgcctgaaagcgctgcgcgaagatactggcattcagtatgaagggcgtcagggaggcacgctgcaactgttccgcaccgagcagcagtttgccagcgcctataaggatattgaggttctcaaagaggcgggcgtaccttatgagctgctggagtcaagccagctcgccaatgcggaaccggcactagctcaggtagctcacaagctgaccggtggactgcgtttgccaaatgacgaaaccggcgactgccagatgtttacccgtcagctggccgacatggcacgacaggccggtgtgacctttgaattcaacaagagcgttgaccgcctgctggtggacaacggtcagatctccggcgtgctctgcggcaccgaagtcgtcaaggccgacgcctacgtcgttgctttcggctcttactcaaccgcattgctggcagatttagtgtcgatcccggtttatccgctcaagggatattcattgactattcccatcaccgacgaggcgtctgcaccgttctccaccgtgctggatgagacctataaaattgccattacccgctttgaccagcgtattcgcgtaggcggcatggccgagattgttggtttcaacacccagctggcaaaggctcgccgtgagacgctggagatggtcgttaaggacctttatccaaacggtggcagagtagaagacgcgaccttctggaccggcctgcgtccaatgacgccagacggcacgccgatcgttggcaagactaccttgaaaaacctgtatctgaacacggggcacggcactctgggctggacgatggcctgcggttctggccagctacttgccgacattatgtctggcgtgacgccggctatcccgtctgacgacctgtcggtcgcgcgctacagcgcaggatttgtgccacaggctgacactcacaagatgcacccggtcggctaatacgccgggaaatccctcaaaaccataataaaagacgcagatgcccgccttcaacgagcggcgggcattagtgaggtttactccaggagttttcatgccacgcccgatttctgccaccctgtcgatgtccgctttagataataacctacaggtggttcgtcgccacgcgccgcacagcaaagtctggtcggtggtaaaggccaacgcctacgggcacggtatcgcccgtatctggcaaagtctgcaaagtaccgacggcttcgcgctgctcgacttcaacgaggcggtgctgctgagggaggccggttggcaggggcctattctgctgctcgaaggatttttcaaccccggcgatctcaaggaaatcgatcgctaccgtctgactacgagtgttcacagccattggcagttggcggcattgtctacctttgaggccagcaagcctgtcaatatttatctgaagatcaacagcggcatgaaccgtctgggctttcacccgaacgaggccgctgatgtctggggtcagcttcgcgccatgccacaggtcggtgaaatcacgcttatgagccacttcgcgactgccgacagtcccgaggggtgaactggcaggtggataatatagagaaagggacgcagcagatccccggtccccgttcgcttgccaactctgccgcgacgctatggcacccgcagacccatcacgactgggtgcgcccgggtattattctctacggcgcgtcgccgagcggtagcgtgcaggacattgccaatacgggtcttaagcccgtgatgcagctgcgcagtgagattatcgcggtgcagggactggtggcgggtgaccgcgtcggatatagcggacgctaccgcgctgagcgtgaacatcgcgttggcgtggtggcctgcggttacgccgatggttatccacgtcatgcgccgagtgggacaccggttagggtgggcggcgtgcaaacggtgacgctggggacggtgtcgatggacatgctagcggtggatttgacgccgtgccccgatgcgcagattggtaccggggttgagttgtggggcgataacctgccgattgatgacgttgccgcctcggcgggaacgttgggatatgagctactgaccgcgcttgcgcctcgcgtcccggttatcgtgaaatagactgcctggtccctgagggccagttatcatgaatgggcggtgaggattgttttaagctttttgctgcgacgtttcgctgaccaggccagcacgaaagccgtcagcatgaccacgcccaagcaggccttaggctgcatcggtaacgccattgccagcagtccgaggcccgcgccgcccgccatctgcacgaatcctaccaatgctgaagcaattcccgcctcgctcgaatatggctcaagcgcgtagctggtcgccgggccaatgacgaaagccaatccggtacaggcgctcgctacgggtagcatatatacccaggtctccagctgagtttgtgcgggcaaaaatgcgataccggtatacagcgccgtgccgcccaacagcataaatacgccaccggccgcaagacaaacgggacggccaaccttgcggataatacggttggcgatgtagctcatgagcataatccagaagccgttagcgccaaagaccagcgaaaattgcagcggagagagcccgccagtggtcatcaacacgtttggcgcaagggaaacgtaggtcagcgccatgcccattgccctgcgttgaccaaagcaaagataagaaagttgctgtcgctaaggatgcgccaatactgacgcaacggcaggctgccgacctgtcgagtatgcgcagggcgagtttccggcaggaaggccagcaccagcagcagggttacggtggtatagccaagcagcgcccagaaaggcgcgcgccagccgtaatattgggcaatcagcccgccgattaacggcgcgagagcgggcacgatattcagggtaccgttgaggaaaccaaaggcgcgcgcggcgtcatcgcctgaaagtctgtcgcgcacgctgctgaacagcaccactgaggtacaacagacaccgagactctgcacaacgcgggaagccataaacatcgcagcgttaaccgaggtggcggcgacgctgacgcctatcatatacagcaaaataccggcaatcgccatcgggcgacggccgtagcggtcaaccagcggtccggcgagcagttgcccaaggcccagcaccagaataaacagcgagatcgacgattgaatgacgctctcgctgctgtccagtccgcgggaaattgctggaatcgcaggcagatagaggtcgatacccaagggccgagcaaaaccagagttaataataagaaaaggaatttttgcatagcgttgcgcgcatccattctaaaaaagggtacaagagtaatgatttcgttactaaatagaaagagacgcggtgaatgaggtgtactgaaaattggaaaataatcaggacaccgctggcgatgtcccgaacgtattgaggttattgcaggggattatttccagaagtcatcaaacacggtcaccggcggttgacgtttgtgctcggtccgcaggtaccagttttcgataattttcgcatactgtggctcgatggttttgccttcaaggtagtcgtcaatcagctcataagtcacgccgagtgcggcttcatcgggaagagcggggcgattgtcttccagatcggccgtcggagccttggtgtaaagatgcgccgggcaacccagatgcttcagcaatgctttaccctggcgcttatttaggcggaagatagggttgatatcggtgccaccgtcaccgtatttggtaaagaatccggtgacagcttcggccgcatgatcagtgccgaccaccacgccagatttcataccggcaatgctgtactgcgctttcatacgctcgcgtgctttttcattacctttaataaagtcgcttaactcgatgccaatatcacgtaacgttgcctcgcttgccagcacggcgtttttgatatttacggttaacacactgtcaggcttgataaaattgatagcgtcgaggcagtctgactcgtctgcctgaacgccatagggcaggcgtacggcaataaactgatagcctgcatccggagattcgctgcgtaattcgttaattgccgtttggcaaagtttgccggtaagagtagaatcctgcccgccgcttatgccaagtaccaaagacttaataaaagggtgagcacgcaggtaactttttaggaaatcgacgctgacgcgaacttcctgctccacgtcgatttgtggtttgacgtgcagagcctggattatctcttgctgaagtgccatgaacattcctcctgaaggctgccagcgaaaaccgcggcaaagacttatgttttaaaacatagtttaaaactaacccgcgccggagaaaaggacaaggttcgacgagtgttagcaggaaattgcgaacgcaacagcattttatctgcgctgttgagggcgagaaggacagtagtgaagatgcagatcgaagggcggagtcaaacaacgcgtatttccttcgcgtaaccgttgaaagtatgaaatcaacgaaccgaagcgtaatgtttttgtatgtatatatttcaggaaatatacaaccctaagaatgctctaaaaaaccagcggtggcagggatattactggcttggtgttgtatatttgttgacttagtaatatgccagaatgctgagcagtagaaactgcaaaggcatatatgcaaatgcagtgatgggcataattattccactggctattagcctttattcgcctaaatctattggggaaaccaaatgtttttcagggttgttcgtcgtttacccgcttgtgccatcgtatgtggtgctgcgctgtttagtgtttcaagtcttgctgatactgatgtcttcaccgcgttagataacccagccaccgcgaagaaaaatttcgacggtaacgttcaggccggttatagcgcgcaaacggggaatagcagtagcaataacctcaatgccaataccactatgacctggttccagcctaatacggcttacagtatttggggctcagcggttaacacctcttcttcaggcgttcgttcttcagaaaaatatcaggcggggggcgtacacgttacaacctttctgatgtgaactacctgtttggtcaggctaactggctgactgaccgtttcaacggttatcacgcgcgtgatactgcgaccctgggttatggtcgtcagatctggaatggcccagttcataccctgaaccttgaagccggtccgggcgttcgtcatgatgaattcaccgcaggtggcaataccactaaagctatcgcctatgcgtctggtacctattcataccagataagcgataccgcgaaatttagcgaaggtgtttctgttttagcggcagacgatacgaccgtgaactccgaaacggcgttgtcagttgctattaacaaggacttctctctgaaagtggcttatgacgtgacttacaacaccaagccgccttcaagcgcgcctaataaaaccgacaccgtgacctcaattaacctggtctacggtctgtaagtttcagtttttaattaaaaaagtcagcctcagggttggctttttttttacccttcattctactgtccaaaaaaaagcccgccatggtggcgagctaaaagaaaatccaatatttacacatacatgcttagatagcacgtctctaaggtaacacggggtagagcggcggaatgtcaggatcctgtaatcgaattattaaaaaactgattttatcgtgtggatgaatcacagagcacagagggaaagaacatggatatgagtgagagtacggcatcacctcgagtcattaaaccttaattcatattgttggatatcaaagtctgttaattgcccagtatataaatcatggagtatgaagatagctaatattgcactccttttgtgcaatattttaggggacagagtattagaaaagaggttaacggttggttgattattaatccattcgggatttcaaacgctaaattatgagattttcatcaccttttttaaatcccctccatttagtgtcctctcactttttaagtatgagattttcatcactattttgataactatattatgacaacatttatttaacgaggcgtgattaagttgtgaacaggcaataagtgggggaaagactatgatgacttacaatgaaaaggtttggttagggatatttgcagtgtgcaccttgttctggatgtcgctggctgccgctggcttgtatgccgccattcactgaaaacgaatctaccccaaacagcataagtaaggaaaggcaacacgactaaggacctgctaagcatcctgatgataaagcataatgagttaacgccattagtcatcagtctcagcaggtcactttctcgaaaattacaagaaatctttagctaatgcctaggattctttttttaccagggaatggctttctttttccagatgacattgtctttatttttaattttgaagtataaagcgggaataatcagcgacgccgcaatggcgacgatgaacagtagccctttaagcgcaaagttgcttgaggcaggataaaaagcagaaaaaatgaccgcccaaatcgcgaccagcacaattctcaggtagcgtattttccttctttctgaagcactcacgtgtcccttaactctttccgcaccgcattgaatgcagcggtcttgttgtttaacaagttcgctctcgcaaaaaggacaatgatttttctctggtgaaaaagattcgttcgtcatgttgttcataaaagttaccgcatttattagtataagtactcggcatgagtatttcacaaccgcggcataggattttgcttaaacttgaacgaagtgggttctattcgtgctttttttgattttttattattttaatcaataggttgagaagtggtggtgatttaggtttagtcctaaaaagcagcgggcatgaggcgtttgagataagcaatgagcgtgggaggcaacgccatccccgtaccatcgaagagttgattatctagagtgctttacgcttccagataatgttgtttttattttttactctgtaatagatatagggaaatatgaatgaaagcacaatagataaggcaaatgccaggaaaagcatcggaggattactggtagtaggatacaaatagtagaaagtcagtgcgcttgcaattaaaagagtaatcacagccatccgcctcgattttcttgcagatgcatcaatataaccttttatcatatgagccttgcagtttgaacaatgcgtcacgtctgcaggcatttccgtattacaaatagagcaggtgttagtatcggacctgagtttattattcattcgttataccgcttcgtagtcgtaagtttgaactgttaaaagcattccatacgctggcatggagtaaaatgattattaatagtaaagctatgtaattaaatactcttattgtgtcaatagtttagaacaccagcgcgctttatagcaaacctaaaacataaaaaaaatccgagatgggcttttaagaccctgttttgaaggaggcacgcaggcgcgcgcagagctcgcacgctgtagagagacataccttaagggatgaagagggaagtatgacgagagggagagggtaaacatgcctcaaaagaggcattatcatgtttacgtcgggctgcttttccttttccagattatgttatttttatttttaaacctgtaataaaggtgtggaacaataacgatcagtattattccgacgataaatacgctgactaacaggacaatactaccgggttcctgcagttgaaaataaaagtacccgcagagaataatgaataatgcagcacggaataaattgagctttttacgttgctgggcattgatgtggccaacgactctctcggcaccacattgcttacatctgtctgatttctcttctaaatttgtgtggcaaaaggggcaaacttctgtttctggtgtaagatcagtattcatttattgataccgcgctcgtgtacgtgaatgaatgaaataaaccttgtcggatccatgggaactcccattctaacgagggtgcttacctcaaatgctgtcagagggatgagaatgacgcgctgaccgggatgatccaaaatagcctgatcaatagactacaccctgagtgtgacattgtatcgtttattatatttatgagttactgacggcagagtaaacactccaggttgaattacaaaaaaacagccagtaaggttaattaccggctgtgattttaataagcaatgaagattagttttctgtcgtctgcttgtggaacagttcgcggaatacaggataaatatcttcctgttcacggatgtgctgcatagcaaagttgccaaaatgctgctgcagaacctcgtactcacgccacagcgtctgatgcgcacgacgcgtaatctcgatatagctgtaataacgtaccatcggcagaattttctgcgccaaaagctggtggcacagcggtgagtcatcggcccagttatcgccgtccgacgcctgcgccgcatagatgttccactgagcagggtcgtagcgttcctgaatcacttcatccatcaacttcagtgcgctggagacaatggttccccccgtttcctgagagtagaagaactcttgttcgtcgacctctttcgcctgagtatggtgacgtatatacaccacgtcgacgtttttataggtccggctcaggaacagatagagcaggatatagaaacgcttagccatatctttggtggcctgatccatcgaaccggatacgtccatcaaacagaacatcaccgcctgactcgaaggctcggggcgacgttcatagttcttgtagcgcaggtcgaaggtgtcaatgaaaggcactttggcaatttgctgcctcaactctgcaatttcttttcgcagccgttcctcctctaacagctgggcaggttcgctgttctcaacctcggcaaggttgctttccagctcacgcagcgttcgttttttccctgccgacatcgccgtccggcgcgccaacgagttttgcaaagaacggacgacgctaatattggccggaaccccgttggaggtgaagcccgagcggtgcgttttgtattcagtaagctgcttatactggtttttcttcaggttcggcagcgccagatcctcaaagagcaggtcgagatattcgtctttcgatatctggaaagagaattcgtcctgaccttcaccatcctggctggcatcgccttgaccactgccgccaccgcctccgccctgagggcgctcaatgcggtcgttctgcacgaagtgatcgttgccaggatgaacgcggtggcgtaacccaccgcggccctgatgaaacatgggttcgttgatatcttcaacggggatcgacacggactccccgctgctaacgtcggtaaccgaacgcttattgatggcctcggcgatcgactgttttatttgcgacttatagcggcgcaaaaagcgctggcggttaaccgcgcttttattcttgccattcagtcgacggtcaataaagtacgtcatatagcccccaaacaacgttgccaacgatccccgctttgactccgagtgcttgttacgatgatttcctcacgcgcagataccattcacaaagcaggcgaacctgtttacgtgtatatcctttttccatcattcggtcgacaaagtcatcgtgctttttctgctcatcggtcgacgtcttggcgttaaaggagataactggcagcaactcttcggtatttgagaacatttttttctcaataaccgtgcgtaacttctcgtaacttgtccagttcggattacgaccactattattagcacgggctcgcagaacgaagttgactatttcgttacggaaatctttagggttgctaatacctgccggtttctcaattttttccagctcggcattcagggactcacggtcaaacagctggccggtatccgggtcgcgatactcctgatcctggatccaaaagtcggcataggtgacataacggtcgaaaatgttctgtccgtattccgaatacgactcaaggtaggcggtctggatctctttaccgatgaattcggcatatttagggatcagatagcctttcaggtgctcgagatatttctctgccacgtcctgtgggaactgttcacgctcaatctgctgttccagtacgtagaacaggtgaaccgggttggccgccacttctgcatggtcaaagttaaatacgcgagacagaattttgaaggcaaaacgcgtagacaggccgttcattccttcatcaacgccggcgtagtcacggtattcctgatacgacttggctttcgggtcggtatctttcaggctttcaccgtcgtaaacccgcattttggagaaaatgcttgagttctcaggtgatttcaggcgtgaaaggatagagaaccgcgccagggtttcaagggttcccggtgcgcatggtgcatgcactagttcactgtggctaagcagtttgtcgtaaatcttcatctcttccgacacgcgcaggcagtaaggcaccttcacaatatagacgcggtcaaggaaggcttcgttgtttttgttgttgcggaaggtcacccactcagattcgttggagtgtgccaggataatcccgttaaacggcagggcagagatcccctcagtcccgttatagttaccttcctgggtcgcggtcaacagcggatgcaagaccttaattggcgccttgaacatctcgacgaattccatcacaccctggtttgcacggcacaatgcgcctgaatagccgtaggcgtcaggatcgttctgcgcgtggttttcaagtttgcggatatcgaccttacccaccagcgccgaaatatcctgattgttttcgtcaccgggttcggtcttggctatcgcaatctgttcgagaattgacggccagactttaactactttgaacttggtgatatcgccgccaaactcgtgcagacgttttgccgcccagggcgacataatagtgccgaggtagcgggttggaatgttgtattctttttcaagaatatgggcatcctcctgcggattaaacaggcacagaggatggtcgttaaccgggctacgttcaccgttggcgctcaagacgtaaatcggaaccctttgcattaacgcttttagtctttcagccagggatgatttaccgccgccgactgggccgagtaaatagaggatctgtttcttctcttccaggccctgagcggcatgtttgagataagagacaatttgctcgattgcttcctccatcccatagaattcttcaaaggctggatagcgtgcgacaacacggttggagaataaacgcgacaggcgtggttcaagcgcggtgtcgaccatgacgggttcacctattgccatcaacaggcgttccgcggcattaacataagcactgcgatcttgccgagcgatggtaagaaattcctgcagtgtgaactcttcatccttggcagcttcatagcgctggcgataatggtcaaatatgttcatagatgcccgtccttcgttatttagcacaggttaaagagagccaataaagcggtgatacagctcccggaagaaaattccccttactgactatctgttaaagatttagcaacccttatgccaacttattgttgctctatttaatttaagtagagtcatggtcagtcatgagcaacacgtacaggttacatcctcagcaagttttttctcctatatataagcgtagtttgaccttgcaaaaatttcctgtgcgaaatgttagttttttaagccatatcaaggactcagttattggaataccgctttcaggccttgcaggacgtggggtgcaggaataatgagcattttttagtcataattatttcataatccgcatataaattattcggttgctttaggtttttgtgcgaattccctgacgcttcgttacagatgttttacactgtcgccgatttcaaaacttacggatgaatgtaatgaaaactgtctttctcaaggctctgcctttcgctgccgttgcagcaatgctctgccagtccgcctatgcgggtgacctgtctctgggcgcagctgcgctcggcagctccagcgtttatcgcggatacgacactaaagtttatccgatccctgttatcgactacgaaggagacaatttctacttccattcgctgatgggagggtactatctgtggaaagacaagcaaaatcagctgagtctggtagcaggttataatcctttcggttttaaaccgagcgacagtgacgacgaccagatgaaacgtctaaaccgtcgtcgcggcacactgatggccggtgtagcctataatcatgatgcggagtggggcacccttcgtgccatgctgaccggcgatacgctgaactacagcaatggcattgtcggcgatttggcttatctttataccttccatggcgacaaatgggccgttgtccctggcgtgggtgtgatgtgggacagtgctaacgagaacaaatactactacggcattaacagtagcgagtctcaccgtagcggcctgaacagctacaagcctggcgacagcgttaatccctatgttgaagtttcagcacgttacagctttgccccacagtggcaggcgttcgtgaccggtcgctacatccgcctggctgatgaaatcaaagacagccctatggtagataaatcttatactggcgtcctgatgaccggagtaagctataccttctaatgacggcataagcatcaaggtgcactaatttggtgcttattttgctacttaatggggcgtttcgccccatttgcacgtctggagggcagcggcgacgtggtcattgattttgagaactgcctcacagtattaaaggtgaagaggctttgcacactcttaacgcttttcacaccgaataataatgacctggacaggagcaaatgatgaacgcgaaaaccgtagaatttcctaatggaacacgggtacccgccgttggacagggtacctggtttatgggagagcgagagtcggcctttcgctctgaagtcaatgcattacagcaggggattgacctggggatgaccctgattgataccgcagaaatgtatgccgacggtggggctgaacgagtggtgggtgaggcgattgccggtcgcagggataaagtttacctggtctcgaaagtctatccgcagaacgcagggggcgctcgcgcagtgaaagcctgtgaacagagcttgcaccgtcttaaaacggactgtatcgacctctatctgttgcactggcgtggatcgatcccacttgaagaaactgtgcttgccatggagttattgcaaaaagccggtaaaattcgacagtggggtgtctcgaatcttgacacccatgatctcgacgagctctggcaggtgcagggggacagaagtgcatgaccgatcaggtgctttaccatgctgcttctcgcgggattgaacaccaacttctgccctggtgtcgcgaccatgagatgccgattatggcttattgtccgctggcacaggcgggtaatctccggcaggaggtgttgcatcatcccattatgcaacagctggcgagggcaagaaacgtcagcagtgcgcaaatcgcgctggcgtgggtaacgcgtttcgataacgtgattgctattccgaaagccgtacagcctgaccacgtcaaagagaatgccgccgcacttaacctgcgtctcaacgcacacgaactcgcgcttatcgaccaggcgttccccgctccgaatcaaaagactccactggatatcgtttaaaaaaagggacgacagaggtcgtccctttttggcgctaccttttatttaaaacctaaggcttttatttaataccaaagacgatcgccagtttcgcgggtgccgcggcggtgcttatctgggaatgtgagatagccgcggtctcgacgcaaaccatggttttatagccgtcatcggccatgtctttcatcgatgcggaattctccgcacccggattccagctcaccacgtcgctattgccttgatgtttaacgctaagggtacgtttgagcaccggatcgacaatcaggctttctttttcgggatcggtaaagatgcgatccgttaagccattgaacgtcagtgggccttgcaacaacgcggtttcgccattggccaccttatcggtataaggctggcctaaaccttcaaccttcacctcgctaatgtcaccaatctcgaagtaggcgtgcagggcgctggtggtctcaaagtcgccgtgcgactcgagttcgatggagcattgatcgccgaaagagaaatgtgcatgcaaggtaaaggcgtgcggccaatatttgcgcgtctcttcactgtctttcagcgtaagggtcaggttgaccaccgaatcattctcgctgtgcgcggttaactgccagggtaggttgcgtgcgaagccgtgagagggtttacctgcgggcccaaaccagggccaacacacgggaacgccgcctcggatggcaacacccggctcgaaggcagtttcgctgctcagccagatgaccggtttctggccagtcggttgccagctcaccagatgtgcgccctgaagcgtgatggacgcacgacccttcggatgcgtgataaccagcaatggcaggtcggcaatttggctttggctgatagaaggagagatttgtttggtcacgggaagcgtgaaaaattgttcgctcatggtgtagtcctgtgcaatatcgagtgaaaactacgacagggaagaactgacagacgttgggctaaacgaaaaagggcgacttatcgtcgccctctgtcagtccaacacaacgttaacttatttgttagcgatgtgagagatcaggtccagaactttatttgagtagccagtttcgttgtcgtaccaggaaaccagtttcacaaagttgtcgttcagagcgatacctgctttagcatcgaatacagaagtcagtttttcgccgttgaaatcggtagaaaccacttcatcttcagtgtagcccaggatacctttcagctcgttttctgaagcgcgtttcagttctgcacaaatttctttgtaagaagctggtttttccagacgcgcagtcaggtcaacaacggaaacgttaggggtaggtacgcggaaagccataccggtcagtttaccgttcagagcaggaataactttacctactgctttagctgcaccggtagaagaagggatgatgttctgagatgcgccgcggccgccgcgccagtctttgtgagacgggccatcaacggttttctgagttgcagtcgttgcgtgaacagtggtcatcagcgcttcaacgataccgaacttgtcgttgataactttagccagtggcgccaggcagttggtggtacaagaagcgttagaaacgatttcctgaccatcgtaagagttgtggttcacgcccatcacgaacataggagtgtcatctttagaagggccagtcagaacaactttcttagcgccagcttcgatgtgtttacgtgcggtttcgtcggtcaggaagataccggtagcttccgctacaacgtcaacgttcacttcattccatttcaggttagctgggtcacgctcagcggtaacacggatggttttgccgttaacaaccagatgaccgtcttttacttcaacggtgccgtcaaaacgaccgtgagtagagtcatatttcagcatgtatgccatgtagtcagcgtctaacaggtcgttgatagcaacgatttcgatgtcagaacgttcctgcgcagcacggaaaacgatacggccgatacggccaaaaccgttgatacctactttgatagtcatatattccaccagctatttttcagtgaataaaggttgattgtaaaattacaaaaaccttggtgagcgtcaagcggaatcgcaacaattgttgcggtaagtcaaaccttgcacctactattgttcgcttattgtacgttccgtttcattatcagctgttacgcatattggggcgtatttacggggtttaaactgccgcagatcaaatatgtgatcaccatcacacatgtctgcgccccgcaccaatggcatagagtttaagccaaaaccggctgactcgttgttacttttttgttattattaactgttattttagttgattttttcatctcgaagagaacggcacccatggccaacgaattcaaagatacccctcaaaatccagaacttactgaaattcaacgttatgtgacgcaagagcgcggcacggagcgcccctacaccggaaaattgctgcacaatacgcgcgacggcatctatcactgcctgtgctgtaatgcgccgctgttttactcggacaccaagtttgatgcgggctgtggatggccgagcttctatcaaccggtgacgcatgatgctattcgctatcttaccgataattctcatgggatggagcgcgtagagatccgctgttccaactgtgacgcgcatttgggccacgttttccctgatggcccagagcctacaggtgaccgttactgtgtgaattccgcgtcaatgagcttcattgatggcgagaacggcgagaagactgcaggctaatttcttcggcagacccggcaagttccgcgccgggtctgccgcagggaaatattaaaaacatttaacaaaatcgattcagccatttattcatcaagctggaataattctgtgaagcgtgggagtgttttgaatggaaattcgtgaacttgtcgacgtcatgacccctgaaatttaccaacgtctcgccttggccgtcgagttgggcaaatggccggacggcgtccgtttgaccgagcagcaaaaagagcacagccttcaggtcgtcatgctctatcaggcacgccataacgttgacgcccagcatatgacggtgggtaccgatggccagatagtcacaaagagtaagcaagagcttaagcaccagtttctccaggaaagcttgatcaagattaagaatggttcctgacagtaaaccggtgttcctctaaccaatctccagagacaggggctggcaccggacgagtcccaacccttaattattcacatggcgaggtcattggcgctggtgataatcgccgccgagcgcagcatagatctggaccgcattatttcggcgcgccagcgtattttgcatcaggttcaacgtcgctcgtcgacgagcgccttttgcgtcgagccaaggttgaatgtctgtgcgcccaagctgccagcgtgagaaggtcacgcgttcagcctcctgcgtcagggccagcgcttcattgagatactgtgcctgttcgctcaaacggacgcgggcggagagtgcgtcttctgtttcctgcaacgcgcgatacagcgtttttctgaaactgaccgactcggcttcataggccacgcgagcactctggttactgagccgggcggtattaaactgaacgaatggcagggtgagcgcggcggccaactgccctatggggttggccagatactgcgtcagcgtgggactcgaggtgccatagctgccggtcaaggtcagggaagggtaaaaactaagacgcgtggcatcggcatccgccagactgctgcgcaccctcagttctgcggcgtgaacatcggcacgccgtgagagcaggtccaccggtaatcctgccgcaggacaggcaagacagtgtccggcaagtcatcaagctcgggctgtggtgactccggtggcgcgcccatcagtagcgcaaacgcatgtctggtctcgacaatttgctgctcaagctgcgataacgttgcctgctggctgactaccgactgccgggcaaatacctgatcccctcccgaaattgccccagcgcgatagcgaatctgcgttagctccagagtactgcgcgcgtcatgcaggtcggcgaacgcctgggtgcgcagacgatgcaaataaccaagctgccaacgcgtctgcgcaacggcaacgcaaatcgccagacgtgccgcccgccagtcgttttcgctcgcctgtgcatcgagttcggccgcttcgcgctgcgccatcgctgtccccagatgtccaacggatagctcaacgtgaaatttccccccgcaaagcgcgaagtggaaggagcaaaaccctcggggagttcattgggcgactgacgccggcattgaatcccagtgaatccgagggccagcgtgaaagcccgcttaatgacgactgaatctgtgccagcttcgcccgcagcgcgctaagcttaatatcgtcgttttgacgcagcgcctgcgccaatactgcgggcagatccgcgtcacccagagaggcccaaaaatcggtctgctctttcgtcgcaggggacggcatactccagtgcgtggggagctgcggcggcgtgggcggagaacttcgcagcaggccgcagccgcttaacgggattaacatactcaacagcataagcctgcgcaggtttctcattcgcgagccagcgcttctgcggggtctaagcgggcggcctgccaggcaggaagccaacccgaaagcatgccgaccacgaccgcacagcccacggcaatcagcatggccttcaacgaaaataccatctgccacgagggtataaacagcgccagcacaacgccgaggccgagtgacaccgtaacgccaatcgcggcacctatcagacagagcagcacggcttcggtcaggaattgccattggatatcgcgcggacgcgcaccgaccgccatacgtacccccgtttctcgggtgcgttcagtgactgagaccagcatgatgttcatcacgccaataccccgaccagcagtgaaatcagggcgatcagcgataaaaacagcgttagcgcaaaactggttttttcaatagaactcacgaaagccgcgctgtcctgcatataaaagtcctgccgcccgtgcagacgagtcaggaggctttgtatcgctttttttgccgattctgacgtgaggccgttttccaatgaaacggctattgaactgaaccagttctgaccgagaagccggctgctggcggtggtccagggcatccacagcgttagcgccccgttattgtaggctgaagtactgcgcatgacgcccacgatacggcacggctgtgtgccgaccagaataatttgacccagcgggtctatacccgtcggaaaaagtttctgctgcaaggcctgattgatgataaccacagagccgttttgcgccacgtcacgcggcagcaggctgcggcctgccagcgtctcaagattgctggtttcaaggaattctgcactggtgccgttgacgctggcgttggtgtctgcgcgctgccagcgaatacgcagactggcgttgacgttgggcgttgcggcttttacccagggctgggccagcagtagcttgagatctctcgggccgagcgatcgtcggcttgcggcctcatcatcaccgaaacctttgcccggatgcagcgtgatgacgttgccgcccagcgtggcgagcgtatccagaacgtagcgtcttgccccttcaccggcggcgttgagacagacgacggaaacaatgccaatcacgatgcccagcagcgtgaggccggaacgcatcttgtgaaccgagagcgtgcggcaggcgccgagtagattatcggtgatggcttcccagcgagtgagccgccggtgaggcgtctctccctgggttccagcaactaaaggggcgcattaacgtctttcgatttttcaacgtattccgatttttcggcctgattgggttggtctgagcagagctgtccatcgcagagccggagaatacgcccggcatagcgtgcaacctcgatgtcatgggtgatgataatgaccgtgtgcccctgacgatgtaactgctgtaataattgcatcacatcacggccgttttggctgtccagtgcgcccgtcggctcatcggccagaataatctccccgccgttaatcagggctcgggcaatactgacacgctgctgctggccgccagaaaggcgagtgacgccgcgtgtctccaggccgctcagacccaactgactcaggagacgcaaggctttatcacgccgcagcgcgcgcggatgacgggcataacgagcagggacctcgacgttatcggctaccgacagcgacgggatcagatggtaacgctgaaaaataaacccgaaccgctctctgcgcaggcgcgcgcgggcgttgctgtcaaaatgctgaacgtctcgcccatcgatgcgataagccccgtcactcggccggtccaggcagccaaggatattcatcagcgtggactttcccgagccagacggccccataatcgccaccatctcgccggcatgaatatccaaagaaaggttattgagcaccgtgacttccgcgtttccgttctgaaaacggcgactaatagcggtcagagagagcagtggcggcgtcatttcgtcgtctcgctcggcggcaggctcgctatcaccaacgcctccccgtcctgtaaaccctccttgacctcaatcctcgtaccgtcgtcaatgccggtcaggatggttcgtgcgaccgttttcccctcggtgcccatcaggttgacccgatagtggctggcgtcaatctgcgggccaagggcggtgacggggatcgtgagcacgttatcggcgcgttgcagcacaacgctgaccaacgcagtcatctcaggcctaagcgtgccctgcggattggcgacgtcaaacagggcattataaaaaacggcattgttaatggtctccggcgcgggttcgagggtgcgaagcgtgctacataacgggcgagtgtcggctccaagggtggtaaaacacaccggcaggccaggttttacccggctgatgtctgcctcggggatctgcgcgcgtacggtcatgatgcttaggtcagcaatctgtaaaataaccggtatctggtaggaggccacgactgtctggccagcttgggtattgaccgacaccaccgtgccgctaaccggcgcgataatccgcgtgtagccaagattggtcttggcggtatcgacgcgaatttgctgctggtggatttgtgcattcatcgaggtgagttgtgcctgctgcaccgcgatatccgcctcggccgactccacgtcctgctgcgaggccgcgctttgcgtatacattgcctgctggcgtttgagcaacagggcagagcgcttcaccagcgcctgattagccctcttttgcgccagtaaactgttgagcgcaacctcggcatcctgcagggtattctgggacagggtagggtcaatctcgccgagcacttgaccttgatgaacaaagtctccgggcgtgacgcttagggttttaagctgccccgaggcctgagaaccgacgtcgatgcgtttaatcggctggagaatgccgctggccatgacggtaagttcgagcgtttgccgggtgaccctgacggtcagcggcggagcaggagacgcggtaaacgcttccccatctccccagaataaaaaggctaacaacagcagtaaaataattacgccaatctcttttttatattttatgtttttttaggcggtaggcgcggtggcattatttataagatccttcaaggtgcgcttcgtaataactctggcttatatatttattgggtgaattattaatattgaaatattgttgaagcttataaataaccccctcccaaaagcaggaggggggtgaaatttaattataacatgcagatatttgtccgacggtggtatccgccggcaatagtcccaaagccttaagaatttccccagcttctatttggtcggcaggagtgcccaccggcaccaggctgtgcagcgtggagcaaatatctggggaagtaatcggtgggataggcagcaggtcggcgttagccgcagagctgaaaccaacggcactaaacaatacggctacggcagcgagcgatttgaatttattcaatggaagtttccttaatccttaatggaaaataatttcagagttaacgtaagcagaaggttatttcctgtcgttaactcaccatgccaaaaataaaataattattaagtttggcgaaatcaaaactagcccattgcgtagaatttagtgagtgatttattggtttttttaatcagaacttgatcggcgtcgtaattttatgagttaggttttttatttatttcgttaagtatttccagtctgaatatatataaatattgggtggggtattatttatgaattattctttctcctgcttttatttaagcaggagaaagaatggcgatgccgttacagggcgtcgtaatcgccggtaccttctggccacggagtcagcagatcataaccggtttcagtgacggcaatggtgtgctcccactgtgccgacagcgagcggtctttggtgacgacggtccagccgtcagacaggacgctggttgccgctttgcctgcgttgatcatcggttcgatggtgaaaatcattcccgcttcaagcaccagaccttcgcccggacgaccgtagtgcagtacctgcggctcggtatggtattcctcgcccacgccatggccacagtattcgcgcaccacagagaaaccgttgctctcggcaatctgctgaatcgctgcgccgacgtcgcctagcgtggcacctgggcgcaccgctttaatccctgccaccatcgactgataggtcacctcaaccagacgctgcccgcgaatggtcggtttgccgacgtagtacatgcggctggtatcgccgtaccacccgtcctgaataatggctacgtcaatgttaacgatatcgccgtccttcagttttttatcggccggaatgccgtggcaaaccacgtggttcaccgaggtacacgaggttttggtgtagccgtggtagccgatgttagcgggcgttaccttcagctcgttaacgatgtagtcgtggcaaagctggtcaatttcattggtcgtgacgccgactttgacgtaaggcttgatgaactcgagcacttttgccgccgtgttaccggcgatgcgcgccttttcgatttcctgctgggtatgaatctttacagtcatagttaatcgacttcttttggtagtgaatcggggcgggaaagggccgtcacccgacgtcgtgaattttaaagggtaaagtgcaggttgctgaccagctgagagaggttttgtaccttggccccgcctgctgcatctcttcgattgcccgcttgctgtcatcgggctgaagattaacgccgcgacagccgtcgcttaacagcgtcacctgatatcccagcgccagcgcatcgagcacgctgaacttgacgcagtaatcggtcgctagcccataacaatcagctgctcaacctgctcgcgttgcagccagggtgcagcgcggttgccgctcgcttaccgttatcgaaaaaggcgctgtagctgtcaatcgctgcgtcctgacctttatgcacaatgtagtccagtccggcagtgttgagctggggtgaaagtctgcgcctggcgtgttctgcacgcagtgtaccggccaccatacctgcggcaggccttcgagttcgccgaccgtccacggctctgccgaggagttcagggcaaaactgcgatgatctgccgggtgccagtcctgcgaggccacgaccttgatattggcatgacgacaggcggcaatagccagattggcgatgttgaccgtttcatcaccttcggccacggccaaggcaccgccgtggcaaaaatcgttctgcagatcgataagcaacagcgcagatttcatcttatccccttaaagagttaactctccgcgcaggtcttgctgcatctgttcgcggatctcttccggcgaaagcggctggctcagcaggtagtgcagcttagtcagcgtggcttccacggtcatgtcaaaaccactgataacgccgcgtgcgccagcgcattaccggttgcgtaaccgcccatgttcaccttgccggagatacactgggtcaggtttaccaccacgatgccgcgctcggaggcctctttaagctccttcagcaggtcgcctttctgcggcgcattgccaacgccgtaagagcgcagaataagcgctttcaccggctgctgcaggaagttacgcaccacttcagcagaaatgcccggataaatcgtgaccacgccaatcggttgcggcgtaatgttatgcacgcgcagcggaccgtgggttgccggaatagacggcgtagcgagacggcgaatatgaatcccggcctcgagcaacggtgccatgttcggagacgcaaaggcatcaaaaccatcggcgtgcgccttggtgctgcggttgccgcgatacaggcgattgttgaagaacagcgtgacttcgttaaccgggtggttagcggcaatatacagggaattgagcaggttgatttgaccgtccgagcgcaaagcctcaagcgggatctgcgaaccggtgacgattaccggcttgtcgaggttctctagcatgaaagacagcgcagaggcggtgaacgccatggtatccgtgccgtgcaagataacaaaaccgtcgtactggtcatagtgcgcctgaatgtcgtcggcgatgtgctgccagtcttccggcgtcatgtccgacgaatccatcagcggtgaatattcctgaatatggaaatcaggcatttcaggacggtggaactcgggcatcaacgccagctggcgctgtaaatggccggatacaggaatgtagccctgttctgaacgctgcatgccgatagtaccgccggtgtaagcaacgtaaatcgattttttagtcatttgaacaattcttttttaatcagccagacaggccaggtggggcgattataaagcgactggggcaggaataaaatgtgaatgcgaattgattaaaaaaatggcctcagaaaagaggccattttggggttttcgttcagaaattaagcgttattgcgtgggtgaattacttcacgtcaccgcaggtgagacacatcgcatagcgattttgtggatcgttcagattattgaacaggtccgcctgtgagctcattttcaacgccacgtcggcaaccggagcaggcagataagcctgcgcgacggccgggagcatcgcatgaacggaggcgttcatctgcgagaacaccatatcggtcaggcttggctgatcgacgtaccagttaagctgccattttggcaattttgccagctcggccgctttcttgactgcgtcatcgaaatcacccagttgatcgaccaaaccgttgtttttagcatcggtaccgatccacacgtggccctgcccaatctggtcaatctgctcaggcgtcttgttgcgcgacttggcaaccaggccaatgaaggtcttgtagccgtgctcaatgttcatctgcatcatctgcgagaactccgcaggcagcgctttggtggtcgcgatatcggccaacgggaggttgctacaccgtcggtgtgcacgccaaactgacccagcgtgtcctgataggtattgatcaccccaaagatgccgatagagccggtgagggtgctcggactggcgataatatagttggccggtgtggagatccagtaaccgcccgacgccgccattccgcccatagagaccaccaccggtttacccgccgctctggcagcagccagttcggaacggataacctctgaggcgcttacgctgccacccggactgttaacccggaacacaatggctttgattttaggatcgagtctcgcctgacgaatttgctcagcggtggtatcgccgcccacgtcgcccgcctgaccttcgccgtctacaatcgcaccgttggcaaagataaccgcgatttgtggcgcgttatcatcctgcttttgttttggcgagtagtcgtcaaggctcacgtagttgaagtctttcttctgcttgttgtagccaaaggccttaatcatcgcatcgtcagcttcgccgcgtgaggccagtacatcaaccagcttgtttttcaacgcgtattcggcagtatcgccgtccacctgctgtagaccggtcagcatgcccgccgcgcccgggaacagctgttccggtgtcaattggcggttggcagacacggtattcagatagttgttccacaggccggtgacccagcgggtatccgcatcacgcgccgcaggcgacatgttgtcgcgcattaacggttcaaccgctgatttgtaagtccccacgcggaagatattggtggtcactttcagcttatcgagcagcgtcttgtagtaaagcgtgttggtggcgaaaccgtgcaggtcaacggtccccatcggcgacagataaatcttgttggcgaagctggccagataatactgtgactggtcatagctatcacccacggcgtaaatctgtttgccggagtcacggaactcgcgcagcgccttgccgatatactgtagcgaggcctgatcggtgccggtgaaatcggtcagcgagagcaccataccggtgatgttgctgtcgtttttggcggcacgaatagtgtcaaccaggtcaaacagcgaggtttcctgcaggcgattgctcgaggtacccagcaactcgcggccaatctggcgaaccttgttgttgaccgtgggtttatctaccaccgaaccgctcagattcaccaacagtgcacccttggtcggtgtctcgacaggcttggattgcagctcgaaataaatcccgacggcgaccaaaatgatcaacaccaggaaaagattaagaataaattctctgacaaaattaagcagacgccaggtccacctaagaaatccggcgatgattcgccacagtatgcgcatgttctctccatttagagcgactagtgctgctatcctaatgacctgccagaaaaatgtcagctttaaatcatttcataatttggcaggcggctcaggcaccccatagccttaaccctgtctgatagccacaatacaggggttatgttaacgtaaggtgaatacaactcattatcaggagagaattatggacgctctggacctgctgcttaaccgccgctccgcttcacgcctcacggcacctgcgccgtctggcaaggttttgcagaatatcattaatgcaggtatgcgtgccccggaccacggcgcacttcaaccgtggcgcttcgtgatcgtcgagaacgacggcctgacgcgttttagccatctgttgaaaagcgccgccgagaaagacgggttggacgagaaagccattgagaaagccacgctggcaccgatgcgcgccccgcagattattaccgtcattgcagactataaagaaagtgcgaaagtaccgaagtgggaacaggtcgtttccgccggttgtgccgtgcatgcgatgcagatggccgcactggctcagggcttcaacggtatctggcgaactggcccgtggaccgagcacgccgcagtacgacacgcctttggctgcgccgagaacgaccaaattgtgggcttcctgtacctgggtacgccacagctgaaatccaatacccaggttattcctgccgacagcgctgcgtttgtcagctacttctaaacaggcgtgccgttcaggaagcaagaaacggcattgccgcgacgctcatcaaacttgaatcccccaggggctgctggagagcaaggcggcgtcgcgtctggaaacagacggtttcaacaccacaggccatggtaggcgctcatcgcggcggtggtttatccgcttatcgaaggcgctaccgtggcctgatttatccgataattccctttttcgccgtttttgtgagcgaatgtcccggctgattggcgatagcgacttatcaattctctgcctagcggctaacataggtaaactaaaggacaagttgtcgccccctgtttgtgagccatgcctgatgcgattgtttattgccgaaaaacccagccttgccagagcaatcgctgatgtattacctaaaccgcataagcgcggagatggttttattgcctgtggcaatcaggacgtggtgacctggtgcgttgggcacctgctggagcaggcgcagcccgacgcttacaacagccgctatgcgcgctgggcgcttgaagacctgccaattatccctgaaaaatggcagctgcaaccacgtccgtcggtggcgaaacagctgaacgtaataaagaggctgctgcttgaagccagtgaggttgtgcacgcaggcgaccctgacagagaagggcagctgctggtcgatgaagtgctcgactaccttgagctgaatccgcaaaagcgccagcaggtgcaacgttgtctggtgaatgaccttaatccgcaggcggtagagcgtgcggtctcgagaatgcgcgacaaccgcgatttcatcccgctttgcgtctcggcgttggcgcgttcccgcgccgactggctctacggaatcaatatgacgcgcgcctacaccattctcggtcgcaacgccggttataacggcgtgctgtcggtcggccgtgtgcagacaccggtgcttgggctggtggttcgtcgtgacgaagagattgaaaacttcgtgccgaaagatttcttcgaggtgaaggctcacatcgtaacccccgccgacgagcgttttgtggcgctgtggcagccgagtgagtcctgtgaaccttatcaggatgaagagggccgcctgttgcatcgtccgcttgccgaccacgttgtcgcgcggatagggggtcaaccggcgatcgtcactggctataacgacaagcgcgagtctgaagttgcgccgctgccgtactcgctctccacgctgcaaatcgaaggcgcaaaagccttcggtttgagcgcacagaaaatactcgatatctgtcagcgtttgtatgagacgcataagctgattacctatccacgttccgacagccgttacctgccagaggagcacttcgccggacgtcattcggtgctcaacgctatcggtattcatcagcccaatctgctgccgcagcccgcactcgatgtcgataaacgcaaccgctgctgggacgacaaaaaggtcgatgctcaccacgcgattattcctaccgcgcgcagcagtaaggtgaatttgaccgaagatgaaagccgaatttatggcctcattgcgcgtcaatatctgatgcaattctgcgccgacgcagtatttcgcaaatgcgtgatcgacctggaaatcgccggtggaaaattcgttgccaaggcgcgttttctggccgaggcgggctggcgcacgctgctgggcagcaaagagcgtgacgaggaaaacgaagggacgccgctgccggtggtcgccaaggggatgagcttttatgtgaacgcggtgaagtggtcgagcgccagactcaaccgccgaggccgtttaccgacgccacgctgctgtcggcgatgaccggcattgcacgtttcgtgcaggacaaggcgttgaagaagatcctgcgtgccactgatgggctgggcactgaggcgacgcgcgccgggattatcgagctgctgttccgccgcgagtttctgtacaaaaaaggacgttacattcattcgagtgataccggtcgggcattgattcactcgcttcccgatattgccgccagacccgacatgactgccgattgggaatcaacgctgacgcgtatcagtgagaaaaactgccgttatcaggactttatgcagccgctggtcactacattgcaggacctgatcgtgcaggccagacagaatcgcgtctcgccgatgttccgcagcctgccgtcgaagccgaaagctgcggcggcaggtaagcggaaacgcccaccgtcaaaggcggcgcaaaccggggaatagcgagactacggggaggaaagctgagtgatgtaggcgtcgagcagaggaatatcggcaggcgccagtgcaaactcgagcgcctcctgcggcaagacccaacgcacgtcactgtgacagtgtaacgttatctcaccccgaaagtcgccaacccgccaggcatgcagctcgatgatgcgttctgcctgttgccagtcgttgctggcaatccactggtcaatctccgcctcaatgcccagctcttcaagcagttcgcggcgcagtgcctcgggctgcgtttcacccgattcaaccttaccgccgggaaactcccacatactcgcctggctgctctgggcatcgcgtcgggccagcagaatgcggccgtcgcgttctattatcgcggcgaccacaacgaccgtttttaagccgttcacttcaggtcgaactctgcccacaccggtgcgtgatccgacggtttttccattccgcgaatcgcataatcgatgccggttgccttacagcgagccgccagcggcgtgcttgctaacaccagatcaatacgcagaccacggttgtcgtcaaaaccctttgaacgatagtcgaaccatgagaactggtcgttgacttcaggattggcgtgacggaacgtgtcaaccagaccccagcccttaaggcgctccatccattcgcgctcttccggcaggaacgagcacttaccggtacgcaaccaacgtttgcgactgtcttcaccgataccgatatccaggtccgtcggactgatattgacgtcgcccatcaccagcaccgggttctctaccgacatttgcagctgtaaatagtcctgcaaatcctgatagaaacgctgtttggccgggaatttggtgggatggtcgcggctttcgccctgcgggaaatagccgttgatcacggtcaacagaccctgtggcgtttgaatgtcggccatgatgatacggcgctgcgcgtcttcttcgtcggttgggaaaccgcgacgcaccgctaccggctcttctttggtcaacagcgcaacgccataatgacccttttgaccgtggtaatagacgtgatagccatactggctgacctcttcgagcgggaacatgtcgtcgtggacttttgtttcctgcaggccgatgacgtctggctgatgttgttcgataatcgcggcaagctgatggggacgggcacgcaatccgttgatattaaaagagacgaacttcatagtcgggaaccatttggcgttgaaatcaggcagtgatgttagcagagttttgtcaacgatgtcactcgaagaggggcctgtgaatccaggttaacagcatcttacaaggcgggatggcgctgatttggtgacgaattcggcaggcagagaattttctgtcaacattttgtgacagtctctttttacagtggtcgcgacagggtattataagtgcaagaatttttgcgttttctgaataaggtcaaaactgatgcgcctggaagttttttgtgaggaccgtctgggtcttgcccgagaattgctcgatttattagtgctgcgcagtattgatttgcatgggatagaaattgcgtcgattggccgtatctacctcaacttttcacagctggattttgacaccttccgcgcactgatggccgaaattcgccgcattgaaggcgtgaccgacgtccgaaccgtgccatttatgccctccgaacgtgagcaccgcgccctgcgtgcgctgctggtgtcgatgccagaaccggttttctccatcgatatgaaaggcaaagtcgagcaggcaaaccctgctgctcaaagccttttcgaactggatgaaggacgaatccgcaatcataccgcggcaagtctcatcagcggctacaacttcacccgctggctggatcacgacagtgacaaaccgcacactgaacgggtggtgattcaggggcaggacttcctgatggatctcacccctatcaaactcgatgacgagaatcaggccagcgaagtggttggtgcggtggtgatgttgaaatcggcggcgcgtatgggtcgtcaactgcaagatttaaccatcaacgacgaacgcgagtttgaccacatcgtggcggtgagtccgaagatgcgtcaggtgttggatcaggccaagaagctggcgatgctcgacgccccgctattgattgttggcgataccggtaccggcaaagatttactggcccgcgcctgtcacctgcgcagttcacgcggcaagaatcctttcctcggtctcaactgcgcctcgctgcctgacgacgtggtcgagagtgagctgtttggttacgcgccaggggcttatccgaacgcgcttgaaggcaagaaaggcttcttcgagcaggccaacggcggttcggtattgctcgacgagattggcgagatgtcgccaagaatgcagataaaactgctgcgtttcctcaatgacggcaccttccgtcgggtgggtgaggagcatgaggtgcgggttgacgtgcgcgtcatttgcgccacgcagaagaatctggtcgaactggtgcagcgcggcgaattccgcgaagacctttattaccgtctcaacgtgctgaccgtgacactgccgccgctgcgcgaacgtccgtccgatattatgccgctgaccgagctatttgtggcgcgctttgccgacgaacagggcatgccgcgtccgaagctgaacgcgcagctgggcagctatctgacgcactacggttggccgggcaacgtgcgccaactgaagaatgcgatttatcgtgcgttaacccagctggaaggcaatgagcttcgcccgcaggatctggcgctgccggactttgacgtcgaggttacgctgggtgaagaagcgctcaatggttcgctcgacgatatcagcaagcgcttcgagcgttcggttttgacgcggctgtatcgcacttatccgagcacccgcaaactggcgaaacgtttgggcgtctcgcataccgccattgctaacaagctgcgcgaatacggcttgagtacccgcaagcctgagggcgattctgacgagtaagccccctttgtcttttcactacgaggcctgtgaccggcgcacatcatgtgcgcggtgtcataatctgaaatcgataaggcctcttgagcacgaagggcggcgggcagtatctgccaaattctttgcataaaagccgtttcacgggcatcgctagcaatgttctataagattgaccctgtcaggaaagctggaaacagcaagtgtgcagaaacgagcgttatttcaattatctcccgataacaggaactaagttgattaaaataacctgcctgcgtttataaaccctcctgatgtttcagttaattaaataagggataggataacctcccataaaatatttcaaagcatttcacgcgagagtcggtattaacccctgcacccaataattattttaatgaaacgaagttttgatatttatgaatcactccgtttcagtggctatttttatcaggttttgaagaatggcggagttattgttttctcgccacattatcccaacctcaagctgaggcggcgtttcaagtaaatcaagataaataaccccggttctggctaaatggcgcagagagcaagggactaatgcaatacctattcccgatgcaacgagatttattatcgtttgcatttgaatagcctgctgaatgatatttggctgggcgccgtgcgaggcgtaatagctcatgaccagggcgtaaaaagacggtgcaacctgctgagggaaaataataagcggtgaatctataaccatattaggacacagcttaccctgggtaagatggattctatccttggccagccatgaggccggaacggcagcaatcagcggttccgacatgatttttttgtagctcaaaatagcagggaactgcttgtcagcgggcgggatgatgatcccggcatcaattttttcattgataatcgcggtggtttgcacatcggtggtcgcttccgttaataccagttcgaccgccggatatcgctctctgaaatggctcactagctggggaaggatattgtaaccggcgctgctaataaacgataacatgagctgtcctgattcacccttacgcaatctgtcggctatctcaggcaatgagttcatactattcaaaacgcttttgacgtggaatagccattgttctccgaaaggggtcagcgagacatttcttttggtacgcaaaaaaagtgcgtcgccaagttctttctccagcgccattattgattggcttagcggaggctgcgtcatattcagacgttcggcggccttaccgaaatgcagtgtctcggcgacggtaacgaaatgtttcagctgtctcgtgtccatgactaatatccccagtaacttaattgctatagcagaatatatttcacagggagttttgtcgattctaatatgagttccacataatctttattattaagacagggcaacttataaatgtatcgttcacgcacctcaacccacggccgtaatatggcaggcgcaagaagtttatggcgagccacaggtatgacagatggcgactttgacaagccaattattgccgtcgtgaattcctttacgcaattcgtcccagggcatgtgcatttaaaagatcttgggcaaatggttgccagagaaattgaagaggccggtggcgttgccaaagagttcaatacgattgccatcgatgacgggattgcgatggggcatgacggcatgctttacagccttccttcgcgtgaactgattgcggacagcgtcgagtatatggttaacgcacactgtgccgatgccatggtctgtatttccaactgcgacaaaataaccccaggcatgctgatggcggcgttgcgcttaaatattcccactatttttgtgtcaggagggccgatggagtcgggcaagatgacgctgcgcggtgaaaagcgttctttcgatctgattgatgccatggtcgttgccgccgacgacagcatgaccgacgaagaggtgaaagccgtcgaggaggccgcctgtccaacctgcggatcctgctcgggcatgtttaccgccaactcgatgaactgcctgaccgaggcaatggggcttgcgttgccgggtaacggttcaatgctggcgacgcatgccctgcgtaaatcactgtttttagagtcaggacgtaaaatcgtcgagctgtgccgccgctactatgagcagaaggatgaaagcgtgttaccgcgcgccatcgcgagtgtcagcgctttcgaaaacgccatggcgctggatgtcgcgatgggcggctccaccaataccgtgctgcatttattggccgccgcctatgaaggcaaagttgatttcacgatggctgacatcgatcgtctgtcgagaaaagtgccggttctgtgcaaggtcgcaccggcggttgaaaacgtgcacatggaggatatacaccgtgcaggaggggtgatgggcgttctggccgaactggcgcgtgctggcctgctccacactgacctgccgaccgtgcattctgccaccctgggtgaggcgctgaagttgtgggacattaaaacctccacctcggacagcgtaaggcagttctatcgcgctgcgccaggcggtgtgcgtactaaggtggcctttagccaaaataacttctatccggcgttggacaccaaccgacgcaccggctgtctgcgtgatgcagagcacgccttctcccgcgatggcggccttgccgtgctgtttggcaacatcgccgaagaggggtgcattgtgaaaacggcaagcgttgatccaagcatgatttgcttcaccggcaccgcgaaagtatttgagggcaggacgaagcagtagagggcattctttccggcgttgtcaaagcgggcgacgtggtgattgtccgctacgaggggcctcgcggcggaccgggtatgcaggaaatgctgtatccgaccagctatctgaagtccaaggcgttaaacaagaaatgcgccttgatcaccgatggacgtttttcgggcggatcttcagggctttctatcggccatgcttcgccagaagccgccgagggcggcaatattgccctgattgaggatggcgacctgattgaaatcgatatcccgtcccgctcgattcaactcaaggtgacagaggctgaactcgcgctgcgccgtgaaaaaatggagctgcgcgggcgtcaggcctggaagccgggggcgcgcaaacgccgcgtttcctctgcgctcaaagcctatgcggcaatgacctccagcgccgccaaagggcggtacgcatcatcgaggaggatgaatgaaacgttgcctgggagaaacggacgctgcgccgggcatcgactcccggctaactcacgcggggcgctgtcccgcggcgaatcaggggttcgtcaatacgccgctttaccgtgggtcaaccgtccttgcgccgacggtcgatgacttactgggctatcgtcagcccttcgtttatggccgcctcggcagtccgacgacagtggcattgcaggaaaccctgcgttcgttggacaacagtgccggagtggtactgtgtccctccggcctggcggcgatttcgaccgcgctgatgtcgtgcctgaccgcgggcgatcatttgttgatgacggacgcagcctatcggccagcgcgcacgctctgcgagggcgttctgcggcgcagtggcgttgaaacaacctactttgaccctttactgagcggcgaggcattgcgccggttaatccgacaggaaacgcgagccatctatctggaggttcccggctcacagagcatggaggtctctgacattgccgcaatagtggcggtagcgcgcgagtttaatcttctggtcatcatggataacacctgggcaacgccgctgttctttgatgctatcgggcacggggcagatctggtggtgcaggcgggcacgaaatatatctgtgggcactcggatgtgatgattggcatggtctcagcctcgccgcgcgcgctggcgcagctgcaaaagtactatcgagaaatcggtatgtgcgtcagcccggatgatgcctggctgacgcttcgcggcttacgcaccctgggcgtacgccttcgtcagcatcaggagaatgcgctgcgcattgccacctggctagccaccagacccgaggtgcaatgcgtttggtatcccgcactcgaaggcgatcctggccattccctgtgggcgagggactttaccggagcctcgagcctgttttccgtagtactgcagcccgcatcgaacaaggcggtgtctgccttcctggaaggattacgctatttcggcctgggttattcctggggaggttttgaaagcctggtgctgccctttgactgcaccgcctatcgcagcgcctcatcacgaaaacccgtcggcccctgtgtgcgtttttacattggtcttgaggatgttaatgatttaacagccgatcttgaggctggatttgtgcgcttcaacgcggcatgggatgcgcgttgatctttccatttccaacaagaatgaacatagatgacaaaacaactttgtcttggggctttatgcgcccgatttgcttacacacggcgtggtggcgacatcccgaagccccgctgacgccaattttaactggccggtcatcaagtctttggctcagaaactcgagcgggcctgctttgacgccatttttaccgctgaccatcttgccctgatgccgatgccgcccgaagcgttaaagagaagcgcgacggtcacctcgtttgacccgttgatgatgctctcggccattgcggcctgcaccgaccgtattgggctgatagcgaccgggtcaaccagttacgaagacccttatttgctggcaaggcgtttcgcctcgctcgatcacctgagtaacggtcgcgccggatggaatattgtgaccaccgtgaatcccgaagccgcgctgaacttcggtctggaaacggcgctgaggcatgcacaaaggtacgagcgtgccgacgagttttttgaggtggtgaccaagctgtgggacggttggtcggacaatgcgctgaaaatggacaaagagagcggagtgttttcagacatagagcgcatccggccgattaatcataaaggcaagtatttctcggtaaaagggccgctgaatattgcgcgccccgtgcaagggtggccggtcgttgcgctggccggagcatcggaaggtgcgcggcagatggccgctaagtcggcagacctggtatttggcaacgcccgcagtatcgagaccgggcgcagtttttatcaggacatgaaatctcgcgccgtggcgtttggacgaaaccccgaccatattaaaattcttccggctaatcaggtttatgtgggacatacccgcgcagaggcaatcgctaaaaaacgcagcatggatgacctggttcacgttgaaagcaatattcccaacctttccattcgcctcggtgtcgattgctccaaattcgaccctgacaaacttttacccgaactgccggtgactgaacaggggcaaggaaatcagcgtgaatgggtggctctcgcacgccgggaaaaactcaccgtgcgtgagctggcgaaaagggcagcggagtcggggaccggcgaaatggtgggcacaccgagtgagattgccgaccaaatggaggagtggttaatgaccggtgcctgtgacggattcattatcgtatttcacaccgtgcccgatggctatgacgactttgtaacgatggttgttcctgaattacagcgtcgcggcctgatgcgaacagaatataccgggaatacgctaagggaaaatatcggtttgccaaggcccaacagcccgttagataactaattactgtcctcctttgaatactgatatcgcgttatgtctttaccttgttatttgatgaggggatccccttattcattgctgggcaaagacagtgttattgaaaatggattaagcaaagtttatttcaggagtttctacggtgacgaatatagtaatcagaaaaaataaagccgatttttcatggcatgctgcgggggcaggcttgctgtcttcttttgttggctttgcgtcaacctttacacttatcgttcaggcgctggtaaacgtcggcgcgactcagaaagaagcggcctcaggactcatggcggtgtctatcgcgatgggggtcgcgggtattgcgttaagtatcaagaataaaatgccggttagcgtggcttggtcaacgccaggtgcagcactgttattaggcattggcgcggtcaaaggaggctttcctgctgccattggcgcgctcattatggccggggtcatgctgactctggccggtttatgtaaacctctcggccgggtaatttccaaaattccttcttcggtggccaatgccatgctggcgggcattattcttaacctttgcgtcgcgcctgttcatgctatggcacaatacccgctttatttcgcgcccgtgctgctggtttggctaattatgctcaaagtgaagaggattctggctattccgtgtgccgctattgcgacgctggtaattatttatctgacctcagacctgagccatataacgcggggcagtatcttgccacatttaatgctggcatcaccggtatttaatctctcttcattggtgagcattgctataccgctttttattgtcaccatggcttcacagaatattcccggtgtcgcggtgctaaacgtcaatggttataaacccgacgctacgccattatttaccagcaccggcctgtgtagtctgctggctgcgccatttggtggcccggctatcggtcttgcagccatcacggcagcgatttgtgccggagaagaggcgggagacgatcctgcccggcgctattgggccggcgtggtatgcggtgcggcctacattatttacggcctggcagccggtgccgctacgcaactgatttccgtctcaccgccggtatttatcgaggcagtggcagggcttgcattaatgggagcgctgggaaattcactggttaattccctgaacgataaaaatagccgtgatgctgcaatcgtgacctttttggtaaccattggcggtcacgcatttttcggtattggcggtgcgttctggggcctattggtggggatcgccatgctttacctgtttaaagctaacgctgagcgcaattaaatcttttaaacgttaattattcaaaaaatataagagagcgacgtatgttacacaagatcattcgaatcgaggcaacgcctgtttttgtaccgggcgaggttgacgttgcgggattaaccattgccggaaaactctcgggcgttatcgttgagattgaaacggctggcggtattatcggacacggttttaccgcggtgaccgatgaagaagttatcgctgctattattcgctctgtcgtgacaccgaatttattaggcatggacgccattaatcgtgaggccatctcggaaaaactttactggttactcaccccacgcggccaaaccggctacgcaagccatgccatttcagccattgatatcgcgatctgggatattatcggcaaatcgaccacgctgccggtgtggcaattgctgggcggggcgcgttcagaggtttcgttatataccactttcggttttggctctcttgatcaagagcagctcgcgcatgccgcttcgggcctggtaaaagcggggcataagcgtcttaaaatgctggtgggctatcacgcattggcgcggcgcgaccagggccgttcgctggacgatgttattcatgacgatgcccgtcgagtgcgtgcggtgcgcgaagccgttggcgatgaggtggaaatttacatcgatgccaactgtggcctggatcattatcacgccctgcgtctggcacagaatatctccgattgtaatatcgccttttttgaagagccgattgcagacaacgatccgctaaaacttgccgatctgcgcaatagaatttcaatccccgttgccgccgggcagagcgaagggcagctgttccgttttcgcgacatgttaacccgcggcgctgtcgatatcttgcagccaaatgtctgtatctgcggtggatactcggcgggacttcgtgccgcaagcctcgcaaggtcctttggtgttcccatcgacaatggcgggacgttccctttccaaaatatgcatttgcacgccggagttgccaacggcggaatggtcgagtggcacgttgtggtgattgatatctgccggaaactctttaaaggattacccgattgggacaatggaaaattaaccctgcccacggcgccgggctgggttttgaactcaacaaggaagcgctcggtgaattttctaaaggtccattctcattagggcacggtaaagcctgattgagttaattaactcatcggaagtctccagaagtggcgttttttattatggattttattgatatgtcaaggatgacatgagcgggtctttgggggcaatggcaatagcgtaaataaaaaggcagccttgtaatgaatataataaaaccgaaaaagtatcccactttatattattgtcccggacacctctcttttgcccctcacgtcgtgttaaacgagttgggcaagcctttcgaacttgctcgtctttctataaaagcgggcgatactcagcgggaaagtttcaggaagctaaatccgaaaggcaaggtcccggtgttaatcaccgagaatgaaattctcaccgagtcctcggctattttgctttatctcgcgctgtctcatccggaaagcgggctgctcccgccgactcccgtcggcgccgccagagccattgagtggctcaactggttgagttgcatgttaacgggcgttattgcgctcaattttcatccttcgcgttttaccgatgaggtcgaatctttcaacggtattaaggcgcgcgggcgtctcgaggttatcaaggttttcgagcagattaatcatcgactggccgagaatcaatgggcgctaaaggaggggtattcgatagtcgatcccgtggtattaatttacttcaggtggggaacgttattagagcttgatatgaatcagtttagtcattgggctgctcatactcaacgcatgcttcaacgtcctgccgttcagaaagcgctagccacggaagagattgtcatcgggaattaattcccgggcaggaccatagctggctgagtgcaggtatttatttcatataaacgcatcatccgaagaaatctgggggatttatggcattaatcagtctggggaatttagtcgacaacgttaacgggttttttattaagcacggcaagggtgagtgtcaccccatagagtttgatactaacctgattgataatgattttctcgactcattgtcggttgtgcattttgttatttttcttgaggaagtattaagccgggagatccctattggcgattttgaattgaattcgattaaaaccgtaggggccatttatgacaactatgtgctggagtcattaaacaggccatagcccgaagagagacacacatcctggtgaatctatccgtgagaaaaaagagatgcctaatgattcctgctttctaaaggacgagtatttccaattgttcgcctatggttcctgtatgaaccatgaaagtctttcaaaaacgttattaacggatgccaaagcttattttatcgggccagctctgttggcccatcatcggttgatatttaattattcttcattaaacgagcctgtctgttgcgccaatattcggcctgactacggtcatcgagtggagggcgcgctgtatcgactcccgactcgatttctcgacattattgatgcccgagaaggtgtaccgctgggacgctacaagcgacaacgggtaggtgtcacaacgcttaccgaggggcaggataccaccgcgtttacctattttggtctggtcacgttaaacaatgaggcggcgccgagtattcgttatcgcgacctgctgcttcagggattgtacgacgcaagagtgtccagcagatataaattatccctgcgtcaacatcttgattcattgcccgaacggctaatgaacatttcgtgacgcaggggccgacaccttcttaaaaaacaaagtccaaggcttataaaggcctatttaaaagcaatgaatgattttaatttcacagcaaggaacgagaagatgcagcataaaataaaaatagttgaagagataaatcattgtcggcttgaaattctctcggagggcgcatcctcagaccctgttcgtatcgcacaatgcgtacggaaaacccttgagggacatagtgataacgcgcacgtaaagcttttattagagaatatggaaaatcatcaattaggttcgaataatttattggaattaacgtttaccgacgatcctgactttattttgggcttttttgaggtgccttataacccggacgccttccttgaggccgctttcgttgaagccattgcgattccacaaaacgtgctagatattgttcctgaatcggaagcgttgccggtattgcttcactgctgttctgatgggtttaaaaatccgctatcggttgccatctttgccgaaaactttcgcgatgccgaggttaagccctaccataaagcctattacctgatagaaaaatttgtcgaccgctttaaatcttatacccgacctgctatcgaggcggcgtggtcaccgaccgcgtttcccgatgtcatcaccgccgacgatgatttactcacccgcgccagtgcgatatgggtgcacctgcatgagtattatcaccgaacgggctatctgccgctgcctgaacatctcaaagaaaaaagctctcgtaatggcgcgggcgcggaggagctgcgggtggatatcctgtccattttggcgctgctggatttacacgccaacgaccccgtgttgcgtgcctcgattcagtacattcttgcagaacgtttgattcgttatcccctgcaggcaccgccgaaagagaactatgatgcgcgttcatccgtcgcactctttgaatatttacaacgacatggcgtgatcggccgtaaaggcggaaggttctattttgtgggcggctacgcaagactcggcgaagcgttgagatctatactggtcaagattactgcgctggaatatcgtattagtcagtcaccggcggacgatcgcaaaaagaaactgtccttcctgttgccagatttggctaaaaacaataatcgttgggagttactgtcatgactgtaacccgagcaaacagtctacacaatcgacggggtgccgacgtactgcttgaaacgctgcacagcgagggcgtcgagtacatttttggtaatccagggaccacggaattgccgttgatggacgcgctattacgtaatccgtcgctgaaatatattctggcgctacaggaagccagcgccgtagcaatggccgacggctacgcacaggcctccggtaagcctggtttcctcaacctgcatacggcgggagggctggggcatgggatgggcaatctgctcaacgccaaggtgtcgcaaacgccgctggtggtgacggcggggcagcaggatacccgccattcgataagcgatccgctgctgtatgacgatttggtcagcattgcggagccggcggtcaaatgggcgcaggatgtctccaatgcgtcgcaacttccggtgcttttgcgtcgcgcgtttcacgatgccaacgccgcaccgagtggcccggtgtttctttcactgccgatggacatcatggaccaactcagtgacgttgatattggcgaacgctccgagatagaccgcaaggcgataggcggttcactgccacgactggcgcaggcgttggcgcagtgctcgcccggcaagctggcgattattgccggtgacgaaattcatcacagtcaggcggcgaaggaaaccattgcggtagcggagctgctgggcgcgcacgtttatggtcctcttggccctcacgtatcccttatccgacctcacatgcgctgtggcgggcaacatgccgacgacggcggccagcatcgccgaaattctcaaaaactacgaggccattttcgcgctgggcggcaaatcgctaatcactatcctttacagcgaaggacccgcagttcctgagggttgcacggtctatcaactgtcggcggacgtcaacgatttggggcgttcgtatgcgacgaagctgtcgatcgtcggtgatatcagtgcctcactcaaggcgcttataccggcgttaaaagaggccacggcggcaaatcggtcgcgttacgctgcgctgattagccgcgcggctgatgaacgaaaatatgcccgcgaacagcttgaggccagcgtcgccgaaaaattctcgttaccggtgatagctccgattgttgccgctcatgaggtggtcagggcgattgggccagacgtggcgattgtcgacgaggcactgtgcgtttcatcgctgatgcgcaagttccttaacagccatcattcaggccagtacgcctttatgcgcggcggtgcattggggtgggggatgccggcggctatcggctactccctgggtctggccaagcaacccgtggtctgtctggtcggtgacggcgccgccctgtattcgccgcaggcaatgtggactgcggcacacgagaacctgccgatcacttacgtggtcatgaacaaccaggaatacaatattttgaagaatttcatgcgtaatcaggcgcattactcttcgtcgcagagcaacacgtttatcgcgatggatattgtgaatccaagtattgattatctggcgctggcgcagtcgatgggattgagcggcaggcagatccgacgtgccgaggatattgcaccggcgattgaggcggcgattgccagcgagaagcctaacttaattgagataatcgtgagtgcgggctgatagctgatatcagtattgccgtggcagcaatgcccgattgccaggaaaaagccccgttttcagacggggcttttttggtcgaaattacttcagagccgcgagggcagactcgtagtctggctcatcggtgatttcaccgaccagctggctgtaaagcacgttgtcttgctcatccagcaccacgactgcgcgagaagtcaggccagccagaggaccgtcggtgatagcaacgccgtaggtcagtttgaactcgtcaccgcgcagggtggacagggtaacgacgttagacaggccttctgcgccgcagaagcgtgactgggcgaacggcaggtcggaagagatgcacagcacgacggtgttgtcgatttggcccgcagcttcattgaatttacgcacggacgcggcacaaacaccggtgtcaacgcttgggaagatgttcagaactttacgcttaccgacgaagctgctcagcgcaacgtcggaaaggtctttggcaaccagtgtgaaaggtttggcaacatcgcctttttgcggcagctggccagcaacgctaacggggttaccctgaagatgtacggtctgagtcatgatttgtcctttgtgctattaagccaggttattaagtttttgcgaacttccacagtgtaagttaacaagtatttgtttggtagggaacttttcaattagggcgggggagggcagagcggcccttattcgcttttgggtcaaaagcacgtgccctgcacgctgggcgctgacccagaccagccaaggccccttggaaccccacgccttgttatcggtgcatgtgtcttgccagccgatgagtttgtttcagcggcctacgccacgctccgtgccactggaaagcactccaaacatgagcggcgacacgtatcaagatggataaaaggcgcagagaggcaagaggtagcgccttccactcttgatccaaaagtccttgaccttcccccaaaaaatttgcaattaaaagcctatttgtaattaaaagccccccctgtctataataactacagcctccctgcattctgcccgaaggcgcttttatggagcggtgaatgagacgtgtacgcttttatccggaagcctggcctctgcatacggcctttgtgatagcccgcggcagccgcagcgaagcaagggtcatcgtggttgaaattgaagagaacggtgtgatcggcgtcggtgaatgcaccccgtatccgcattttggggaaagtgaaatttcggtcatggcgcagctcggtgccactgcgccgattatcgagcagggcaccagccggtgggaactgcaaagtctgctgcccgccgggcggcgcggaatgcgctggactctgcgctgtggaatcttgaacagcagcagagcggtcaaactttgtggcagctcactggcaccacgccgctgccttccatcagcatggcgcagaccctaagcattgatacacccgaagcgatggcacaggccgctatcgccaatcagcaaaatggcgcaaccctgctgaagattaagctcgatgatcatttcatcaccgagcgcatggtggcgattcgcagtgcggtaccgaatgtttcgctgattgtcgacgccaacgaatcgtggcagagcgaagggctggcggcacgctgtcagctgctggccgacttaggcgtattgatgcttgaacaacccctgccggtgggacaagacgatgcgttagccaattttattcatccattgccgatttgcgccgatgaaagctgccataccgtcgagagcctgccgcagctggttggccgctatcaaatggtgaacatcaagctggacaaaacgggggacttaccggggcattggcgctggcgtcggctgccaaagaacgaggaatggagattatgctcggctgcatgctttgcacctcgcgagcggtgcgggccgcgctgccattaactacaggcgcaaagtttattgacctcgatgggccgacctggcttgaaaaagacgtggtacccggtctggcgtttcactgtggcgtcattgatttgcaggccacgggggactaacggggttccataaaacgaatcaagcccctgagcggtgggctacaggggcttgattaacgcgtccagagaagggattatttctctagcgggttaaagaccgtataggcggtacagttatactgctggccagccatcgtcaaatgatagagctcggcaccgctggtacccgctggcgcctcgtcaataccgaacaggatggtggtatttgacgggtctggcgtgaaagttttagtgtccgggttataggtggacaacacgtacttcaccttgtcactcatatcggcgtcacggttaccgaaataaatctgtgaagcgttagttttaggatcggtaatctgcaacaccatcgtgtcttggctagtgatagcactggtcagaaccttcatgccgccacagtgggtgtagcccgctgcagtatagttgccaatcatctcggctgcatgcaccacgttggtcatggaaccaacaaccaacaatgacagaagcaattttttcattttttgtttaacctgatgtttaagccagccaccacgtgtgccgggcgtgatacttatacaatatgagtcgatgagaatttgtaacaaagtatcataatatgcaaagtgttaggctaaaaatacgctcaaaaaaacacgttccacgtcacgtcccacatcttgaaacactctatcccgctgcgtttacaccttcctcgaccacccatggcattattactggctttatcggtcattattacctgaattacccgagcattttcggccgatttgttggagcttcaaagagttaacgctaaactaattttaaatagtagagagagtgaggaataccgtggaagtcatcaagggtgaagagttacaagtttcggatgctgtttatgcttatcagctagacggtaaaggtggcgtacaggacatagatcaaaactgtcaggccagtaccgacaagccctgctggctgcacctcgattattcaatgcctgacagcgaaaaatggattaacagtacgccggttctgccagacagcgtgcgtgaagcgcttgccggagagagtattcgtccgaaggttttgcgtatgggtgacggcacgctaataaccctgcgtagcatcaatctcaatgccaacgcgcgtccggaccagttggtgactattcgcgtttatctgaccgacaagatgattatctcgacccgtcaccgcaaagtgttctcgatgaatgaaatcatcaatgatatgcagcatggcaccggtccgaccgataccggcagctggctggttgaaatgtgtgatgcgttgaccgatcacaccagcgattttatcgaggacctccacgacaagataattgactttgaggatgcgctgctggagcaacagctgccagagcgcggtgagatggcgctgctgcgcaaacagctgattgttctgcgtcgttatatggcgccacagcgtgacgtgtttgctcgtctggcaagcgaacgtttcccgtggatgaccgatgatgagcgtcgccgcatgcaggaaatcgccgaccgtttgggccgtgggcttgacgatctggacggcagcattgcccgtaccggggtgctttccgatgaaattagctcgttaatggccgatgccttgaaccgccgtacttacaccatgtcgctgttggcaatggtcttcctgccaaccacgttcctgaccggtttgttcggcgtcaacctcggcggtattcctggctcgagcaaccacatgagctttgcaatattctgtgcgctgctggtggtattggtcggcggcgtcgcctggtggatgaagcgcagcaaatggctgtaactccctacgtagcgggtaaaaaagcataaaaaaaagccggtcatagaccggcattattcgaatcaaacgctatgcaataattctaaataactaaataagacaatatggagcacaacgcccatcgcttgacgttgcattcacctgcgaaatagatattgcttcaatccacgctgatatttattgatttagaacaagtttttgtccgtaaacagccctctttttttcctcgcaccgctgcttttcagattctgatgagagttcaccgccatttccctctctttgccgatgctcctgacatacttcatccctctatccataaagatatctagacatctaaacgccgcttttgtacagtgttgccaggttaaataattcttcatctaaacagtaaccagtgggtaaacatacaaaaaatgaccagtaacattgtgatcctcgatggcggcatgggccgcgaactggcccgaatgggcgcaccgtttcgtcaacccgagtggtctgctttagcattgatggaagcaccacactttgttcgtcaggcccacgacgcctttattgccgcgggttcacaggtcattaccaccaatagctatgccgtggtgccatttcacgttggcgacgatgtcttctcgcagcgcggtgccgagctgatcgcgctatcgggcaagctggcgcgcgaggcggcggacgcggctcccaggccggtcaaggtcgcgggttcgctaccgccggtgctgggctcttatcgtcccgacctgtttgagccagtgaaagcccgagcgctgctctcggtgctggtggctggacttaatgaaaacgtcgatttatggctggctgaaacgcagagttctgtcgctgaagtggagctggtacgcgaggttttgggcgacgataaacgcccgctttggctgtcgtttactctgcaagacgccctgaatccgcaggaacaggccgtgctgcgctctggcgaatcggtggctgcagccgtagacgccgcgttgcgccttaacgcacaagcggtgttgttcaactgtagccgtccggaagtgatggcgagcgccgtcgctgaagccagtaaaatattgaaacaacagggcgtctcgctggacattggcgtttatgccaatgcgttcgagccttctgacaacaagcgcggggctaacgaaggtctcagtgagatgcgtaaagataccgatccacagggatatttgagctttgccgaggagtgggtcgcggccggtgccacgatgattggcggctgttgtggcatcggccctgaacatattgctgccctgaatcaggcgctggcttcaacaagcaaatcttaaaaacaacgaattcttaaaaacaataatcagcgattggaggctgtgcctctcattaagggatactcatgatagatcgtcgttcgtttatcaaaggcgcaggggctctctctgccgtggcggcaaccagttctctgtggccgttttcaaacgcttttgccgccgttacagcggtacctaaaaagggtggacacctggtggtcggcattgataatgcctccagcaccgaccgtctcgatccggctttctggtttgaaacctatatgtatttcgtcggctcgcaggttttcaacagcctggtcgagatagatgaaaagggcgaactggccccatcactggcagagtcctggtcgtccgcagacggcagcaagagctggatcctgaaaattcgtcagggcgtgcagtttcatgacgggcgcgcattgaccgccaaagacgtggtttattcgcttaatcaccaccgaggcgaaaagtcgacctcgccggtcaaaggctatcttgacccggttgagtcgattaccgcgaccggcgaccatgaagtgactgtcaagttgaacgcggcggacgtcgagtttgtgtggctgctgagcgcggtacactttgtgattaccgcagaaaacgaaagcttcgacaaaggtatcggcaccggtgcctttattctcgagaaattccagcccggcgtgactacgctgaccaaacgtaatcctaatcactggaacagcgaacgcggccacgttgattcagttgaaacgttggcgatgaacgactccacggcgcgcgttgctgcgctggtgagtggctccgcgcagcttatcaaccgcgttaatccacgcatcgtgggccgtattcagcacatgccgaatattcagctggtgcgagcgaaagacagcgcaatttataccttcccggggctgtctaatcttgcgccgttcaacaatgtcgacggccgtctggcgctaaaatacgccatcgatcgtaaacaaattatcgacactgtgctcggcggctacgccagcgtggcgaacgataacccgttcttcccgtcgaatcgctactttgccaaagacattccgcagcgtccttacgatccggatcaggcacgcttccactggaaaaagtcaggctttaccggtccattaaccctgtccgttgccgatgccggtttccccggttcggtggacgcggcacagctctatcaacagtctgccgccaaggccggtatcgatctcaaggtcgatcacgtgccggatgacgctttctggaacgatacctggcagaaaaaggtgtttgtttcttctaactgggccagccgcccgaccgctgatgccatgctgtcactggtgtttaccagccagtcatcctggaatgagtccgcatggcacgttccggcctttgacgcgatggtaaaagccgcgcgaggcgagcaggacgaagcgcgccgcaggcagatttatcacgatattcaggtgatgctggtcgatcagggcagcgaaattattccgctttacgctgacgccctcgacggctgttcaaccaaaatcaaaggctttacctcagtaccggggatgccgctgagcggcaaccgcgcggcggaaaaagtctggatcgagagctgaagctgaagccataacgcggataaaaaagtatgtcggaaatgattacgcaacggccttcgggccgttcatctttactgcgactggtcacgctgcgcctgtgctacggcgtgttgatggtgctggccgtttcggtgcttatctttattggcgttcagcttttaccgggcaacgccgccacggcgattctggggcagagcgccacgcccgacgccatccgtgagctgaacctgcaattggggttggataaacccgccgttggacgctatctcaattggcttgcaggcattctgcacggtgattttggcatcagctataccagccgagagtctatcgccggcccgctgtttgtccgccttggcaacacgctgttcctggcagggtgcacggcggtgattgccgtgccgttggcgctgggtatcggttttctgtcggtgcgatatcagggcgggattatcgatacgttgctcaacggtgtagcgcgcgccgccgtggcgctgccggagtttttctccggctatctgcttatcctgatttttgccatcacgctggcctgggccccaagcaacagtacgttgtctgattcgatgtccttcaccgcaagactgtctgccatcgcgctgccgtgcgctaccttagtgctggcgattgtcggccatatgagcaacatgacccgagcggcgctgattgctgcccagagcgcggcctacgttgacaccgcgctgctgaaagggctaacgccggcacgcattctgtggcgtcacgtattgccgaacgcactcggtccgataatcaacgtggtcgccatcaacctggcctacctgatggttggcgtggtcatcgttgagaacgtatttgtttatcccggattagggcagtacatggtggacagcattagcaagcgcgacatcccggtcatgcaggactgtgcgctgctgctggcggggatttacatcctgctcaacctgctggccgacgtgttggcgttgattgccaacccgcgtttacgccatcgtcgttaagtgctgctaaaggaattttgagatgcctgcattaaaaccaaccgcaattctgggactgacagggctgaccctgttcgtgctgattgccgtcttcgcgccttggctggcgccttatgcgccggataaagtcatcgggatggcctggcaggcgcccgacgccacgctgcgtctcggcaccgataatctggggcgtgacctgctgtcgcgtatgatttgggggactcgggtgtcgctcggcgttaccgctctggccgccgtgctggccttcgtcgtgggctgtacgctcggctttatcgcaggggtgagtggcggctggctcgaccagactatctcgcgcatcaacgatatgatcatggctatccccacgctgattttcgctctgatcgtgcttgcggtgttgcctaaaactattctgacgctaacgctggtgctagggctgctggagtccacccgcgtactgcgtgtcgcgcgtgcgctggcggttgaaatcggcgtgatggagttcgtggacgtcgcccgactgcgcggtgaaagcctcggttggatcctctggcgagtcattttgcccaattcgctgcaaacgctgattgccgagtttgggctgcgctttatctttattttgctgttcctgtccgcactgtcgttccttggactgggcattcaaccgccgacggccgactggggcggactggcgcgtgataataaagacggcatcctgtttggcgtctgggccgcactggttccgggcggcgcgattgctgttctggcgctcgccatcaatgcggtcgccgattggctgatgagcggctcgacgcgttcatggggaggtcatcatgggtaatcctttgcttcaggttgagcagctggtcgtggtttcgagcgataaaactcagcgccgtttggtcgataatgtcagcttcgacctgaaggccggtgaagtgctgggactaattggcgagtctggtgcggggaaatcgactatcggactggcgattctcggccactgccgtcacggcatgcgcatcgcgtcgggcagtatcagatttaatggcactgaattggcccgacagtcgcagcggcagttgagaacgctgcgcggcagaaaaatcgcctatgtggcgcaatcttccggcgcggcgtttaaccctgcgataactatcggcgaacaggttatcgaggcgacgctcaagcatcgtattcttccacgccaacaggcgcaggcgaaagctatcgaactgttcacccagctgggtctgccggaaccggcgcagttttatcagcgctatccgcatcaggtttccggcgggcaacttcagcgcgccatgatagcgatggcgctctgcgcgggaccggagttactgattttcgacgagccgaccaccgcgctcgacgtgaccacccagcttggcgtgctcaaagccattgccgacgtcatccgcctttccggtgtggcggccatttatattagccatgacctggcggtggtggcgcagataagcaatcgaatcatggtgttgcagcacggcaagacggtggagcacgcgaccaccgaaagactgctgcacgcgccggaacaagactataccaaacgcctgctgaccgcacagggtgaaccgcgcgaggcgatgccgatgaatcagcccgagctgttgcgcatcgataacatcagcgcgcgataccatcatcagccggtgctaaaaaatctttccctgtcactaccccgggggcggacgttggcggttattggcgaatcgggttccggtaaatcgacgttaggcaaagtgatttgcgggctgcacaagccggaaaacggcgaagtgagcattgaagggcaggcgttgagcgcaggtctgcgggcgcgcagtcgccaacagctacgtgatatacagcttatccatcaaattcccgatactgcgctgaacccgaaagagattatcggcaagcagatttcgcgcgtgctcgagtgtttcaccgaacttacccgccagcagcgtgccgagcgcgtttccgagctgctgacgcaggtggggctgagtcctgaactggctgcccgttatcctgcggcgctgtcgggcggacagaagcagcgcgtctgtattgctcgcgcgctggccgctgaacccaagctgattgtctgtgatgaacccacctcagcgctggacccgctggttgcccgcgacgtgttggcactgttgcgtcagattcagcatcagaccggtatttcatacctgtttattactcatgacctgcaggtggtgcgtgaggttgccgacgaagtcgccgtgctgtttaaaggcgagattgtgcgcaatggctcggtgaacaccacgctttcagagcctttggataattacacccgggagctgctgcgttcggtgccagagatgcgtatcggttggctggaagaacagacggcctgattttttgcgacacaggtaataaaaaacgcgctgtaagcttaggcttcagcgcgttttttattttgtccgcagaggcggggattacttgatctgcaggacgtcaagacgttcgactaccaggtcctcttccgcctgccagccgacgggctgcattgggatgtcttcgcgatcgaaggccaaatcaccgccgtcaacgatttcatcaccgtgcttgatgcccttgaagtcgaacaggttggtatcgttaaggtgcgaaggcacgacgttctgcatggcgctgaacatggtctcgatacggcccggataacgtttgtcccagtctttcagcatgtcgctaatgacctgacgctgtaggtttggctgcgagccgcacaggttgcaagggataatcggataaccacgagcaatcgcaaaacgctcgatgtctttttcacggcagtaggccagtgggcggataacgatgtgtttgccgtcgtcgctcatcagcttaggcggcatacctttcagtttgccgccatagaacatgttgaggaacagggtttgcaggatatcgtcgcgatgatggccgagcgcgattttggtacagcctaattcggtagccgtgcggtaaaggataccgcggcgcagacgggagcacagcgagcaggtggttttgccctccgggattttgtcttttacgatagcgtaggtattttcttcaacgatcttgtattcgacaccctgcttatcgaggtattccggcagaatgtgcgccgggaaacccggttgtttctggtcaagattaacggcaaccagagagaaattgaccggcgcgctttgctgcaaattgcgcagaatttcaagcatggtatagctgtctttaccaccagacaggcagaccatgatgcggtcgccttcttcaatcatgccaaaatcagcaatagctttaccaacgtcacgacgcagacgcttttggagtttattcaggttatattgctctttcttgctaacttcttgattatcaaacattatatcgacactcgagatctaaaaagggcaccagtggggcaatattcaggctggcgccagccgacaaaatgcggcacggagttaattggcgtgtatgttacggattacgcgggcgaaagccaacacgttttaagcggggttaggctgggtttttaaggatattgatgctgtgtaaggcatggcagttttctgcgttgagttctgtttgctactaacctaaagtcagactgtgcagcaaaggcccaaaaaattccctgacatatcagacttgtactctgatatgtcgtgaggtgttaaagggactcgacaagattttgcttcatttcctataccgaaccttaaaagctgtattgaattcccacccgcaggcgggtctgcctttcgtgggtattttttcgaaccgagacattgccaatttcggcatagggcgtccaatggtgattgatgttgtaggcaactttaaaatcttcttcatagtcccatttagcattatcaaacagaatctgattactgtgtttataaatatagttatattcgaaacgccagtcggcaaggcgatagccgagccaaatctctccgcgatgagtttttttatcattattaccgttgtcatagtgtgtctcttcataacgatagcgtgtattaaaataaatgccgctggagaaagtgtatccagcggccaacgacggcttgtagactttattgccggaattcacctctgcggcaaatcctggctgcaaaaaaaacgactttgttgctttatattgataggtaagcgtcgtttccgtgccgttacccaccattctgttaaacggttgattggggttattatcccggagcgccatttatcttcgaaagataaaccgataccattggcaaagcggtgtgatattaagatccggtctttatgctgtttactgtcatcaagccattcgtgtcgaatatcaagggtaacggcatgactgcttgcgctggccagcagcaggccgcagatcagcagtctgtgatttatcattttagagctccctgagatattgagcagtattagggtatttagcgtctcttcctgttaatgaaactgcctttatttccttgctaaaaaattggagtaattaaattctccgtcaggaagacgtgaaatggggcttggaagccgcgtggaaataaagctgtcgggctggatctcttgatgtaaagcattcaccgttctgcgataggcatagaaataattgctgctgtctacgtttccgctgactacatcgttatatctgccctctgaggatctcagcgaaatattggctttaaaagttccttgtttatccgctgaggtatagggtgaaggacggaacaggaagttgaatcttttattgtcaacggcacgattattttcaacgatcagggcacctgggttgaagttatcggtgaagccgtccatgccgttttctacggcaacattattgcggataacatgagcgacaggcaggccttcgccgccgagtttaaagccgttgctgccgttgtgtaccgagaggctgttttctattgtgacgctgccgttcggaccgtcttcaatcttgttgaacaaatcaaaaccgtcatcgatgttatcgtgcgagtagcagttaacgaggcgatttccctctcctacgcgcattttcactgcaaatccatcggcatttttatgccccggatctttatttccccaggattctgaattgcttatcagattgtgactggcccaaagtacgcgtccaataccctctggtgaggcaacccaaatacccgtatcgtctgcgttatgtgccttaacgttgttgatgtgattataactaccagcaatgtgaaagctcttttgagtcacggtgatcccctcaatttgccaatagcttgcgtcgagggtaagcccgttgaacaccacgttattactctccggacgcagcgttttaggtttttttgccgtgccactcgccgttgccgggatctcgctggcagggtattcaccgtcagccatccacagcgtgccgccgggggctaacaggttgactgcggtcgcgaaatccagcggatgttgccgagttccatcgttatctgctgccccttggctgaaacgtaaagccgctgcggatgactcaccggcacccgtttgacagggaaaatgcggctcagggtttagcgttatccgggataaattctatgtttattttgccctcgggttgttggagatgaaatggtacagcgaccgcttcaccaccgccaatagccgtctggctaagcagcgtttgttcacccattttgatctgtatctgcccgcgctcattggttcgcagctggaaaatgccgttctggcttgctacaacaggcgatgacatgatctcgatatggggctcgagaggcggcgcgacataaggcggagacggttgggtatcggccgcgctgagtatcagtttggtatggttaacggtaatgcgggcgttgcgcgaggcgaaaaacccaacgtaataacccgttttatccagctttgtaatcaggtcagcgccattgagagttttacttacccaccggtggctgctttctggcgcataggagacctcaaaccctttatcggtccgagtcagtcgcaaagagaaatgtgcaggcgttgtcaaaggatgataggcctcgcgcacaatacctataccgatattaccccatggatgtttcactccctggcgggctattaaggctacttcctgtggctcatctccgattgccattaccgtgttcatcaccatattggaggctgccggaagctcctcaacgccgggtttggttactggttgccgtgccttgcccaggatattgcgtactaataatccggcaccttcctgtccggcaggttttgccccgttttcaggacctaattgattcagcgtgacatcggcttccagctggaaatttacatcagccggcagtcgtgtatagaaataagtcaggccgtcatggctgttacctattttaccgcctcgactttccagcgtaaaaggtgtggcaagttttacaccggccgtgggaacggatttcccgtccgccagaagcgtttcattgatgccaattttatcctgcaggacattggtggcgaaattaacgtcggtcgactgaccgaaggtgatgctgtgccaaatcagactgctcgcttcaggcacagtacccgccaagacttgcgcacttattccgcatgacagcgcaacaatcaataccttagattcccacataattgttctcatcctaaaaacataaattgtgctggttacgggatgaacccgacactttaaaaatgaaacaacgtttcatttttaaaggtatagcattttatattgcaggcttggggagaattaatgtgaagcgattcacgtttgaataagcgggttagctttttttggaccgttttgcgatgcccgtagtatttcggcacagcctcgaaggagggcgtgcttttggatatcacggtcaccgacatgattaccgaccaggagcgggaagaactttttaagcgattgaggcgctgtaacggacaatttattgattcgagcggctgggggcgctggggtttatagtcgcaacagcgagggaatcattgaggggggctgattttcctgtagcaggcatacagcggcattatctgactaaggtaaatctgcctgaatttctcgaggcctgacaggagtaggccgctgagtccctgcgataaaagggcgtagtgggtcagtctggattgcctgacagagcaaaccattttcgaaaggcagcctttcctgatgaggtgatattcacctctctgaaaccctgaacgcgttttagccaaccccggtgttcacagagagtaaaaaaagcagcgccagcatctccccctagatgagagcgtcgttcgctccagtccagacaggcgcagcaaggctttcgtttggttttagggtcaagcacgacgcccatttgctgaaaattttcgtgacctttttccgtgaggtgagtgccatcatcgtttatccagccctcgcgcctcatagattcgtaaatttctaccgcgacttctccggccaaatggtcatagcaggtacgtgccactctcaattgcaccggagttcgagttttaggcggggaattcttttccacgacacacccatcatcatctcgaccaactgcccaacttcatggcctgcaaggcgataataacgatgtctcccctgcgaaaggcaagtgatcagatggctattgaccagccggttcaggtgagagctcgccgttgatgaagcaatatccgcaacggcgctgagttcagtggcggtccacgctctcccgtccatcaacgcacacaacattttgacgcgcgacgggtcagacatggcggccgcgagggccgccatagaggattcgagctgagtatcactatcatcgacttcgattttgttaagcatatttatcaggaaaccggagcccatggctcagtaattttagctgcaatttgttgattatcggtgattaaaatcagtctattggcatgatcactgtactgagtcagaatattaacaccgtttttagacaacgcggcggcaatttcgccaaactcgccggggcgctcctgcttaagctttctgatgatgggttcattgatacttttgaccctgaacccttcactctcaaggacccatttagctttattaccctcctcaacgaggaagtgcgcgtggcactcattacctgccgtaaaaatgccgcctccttccagaccgacgtcgtgatgccccagtattttacccaaccaggccagttcacccgggatattcttcagaatcacgtgaatatcgtacatttgttatcctctgtcttccgatgaataatcgcgtatgacctgagcgatacgaattctgtaaaatgtgaaaatagaatcccgaccttccgcctgtgcgctcatatggaagatattctttttccaggtcaggaccgcctcttcatcgcgccaccaggaaagtgatagaattttccccgttgatgccaggctctgaaaacgctctatggaaataaacccgtcaacctctgcgagcatcggttttagctcggcggcgagcgccaaatatctttcctgcagagtaatattggactcagcttcaaaaagcactgcgatcattctctctctccctacgaatatgtaagagaaagattagcggtttgccgcgctgatacttcgacgtagagcgaaatgtggaatttaatgaatagggctattggctcatcagggccgatcgtaccttcttcgaacagggtaatttcatatttatactgtgcgccattttcttgaatcttttcttttgccaaaagaggggtttattgaaatgattaaataattacttattgatcgggtttctgaataatacctctcggttaattaaccttttcgttactaatgacgtggtgtgatatgttcttttttatatgaaattattactggtcgtatatttcagccagtgtagctgcgcacctttatctggtgcaataagaatctctctctataaagaattttcgattaggcttcactctattaaattatctattgataaataatcccatgctcgcgtatctttcctcaaggcgttaaacagctatcggtgtttttcggaaattattaaatttaataattagaaggacggaagatgagtcgattttgcaaagtggccataagcattgccttcatgctgagtgcaggagcagggtgcgctgcgtatgctgccgattcgggtccacaagcgttggcattcttgcaggccagccagttgttgcaggtaaagcatcaacttgagcaggggaaagcggcaacgtccacccaagaggcctatgacctgcttattacctccgctaatcgggcgctgaaaacgccgaacccaagcgtgaccgaaaaggggatgacgccgccaagtgggactaaacacgactacctgagtctgagcgcctactggtggccggatccgagtaaaaccgatggacagccctggatccgccgagacggcaaagtaaatcctgccagtaaaaataatcagagtgacggcgtgcggctcgcggcgtttactgcaaaggttcaggatctcaccctcgcctggtatttttcagggcagcagcgctatgccgataaggccgcaagcatgttgcgcacttggtttatcacgccggcaacgcgcatgaatcctaatcttaactttgcccaaggtgtgcccggaatgagtgcgggcagaaacgcgggcgtgctcgatggccgctattttgcaacaagaatcgttgattccgtgctgatgctgcgcggtaacgccgcctggtcctctgacgatgagcgccagttgcgccaatggatgcaggaatatttgcactggttgcagaccagtaagctggcaattaaagagagtaaaactaaaaataaccacggtaactggtacgcgacgcaggtggcgggcatcgcctggtatctcgaccgaccggaaacgataaaaaagatggtggcgctcactgaaagcaaactagacacccaactgcggcccgacggtactcagccgctcgaactggcgcgaacgcgttcattccactacagctatttcaatttgcaggctgttagccttttggccatccttgaccagaaggctggcggtcagaaggggggcaagacctgtggcactacacgacgcccgacggcggaagcgtcttgaaatcattggattttatggcgcagtacagcaatgaagcaaagccgtggccgtataaaacgctggaccgtattagcgtacgcgtcgtgcctctgctttcgtgggcagataacggcatcggccaaccgagatatgagtcgccgatccgcgccgcctcttttagtttaccgacagccactcataaaccaggcgaaaaaggcgaatatcatgcaaacgcccggcgaggtgccatcattgaggcgcagcgtgaaacctggttgacctcgctgccggcttgggaaagcaagagatagggacagaagtcgtgggagcttcacttgcctggcctatcaacaaaaagggtcaggccggaaaataatgccgcagcctttctatcactgtttccagttcggatttgggcaacgcaaagttcaggcgcataaatccctgaccagttgggccaaaattgaggccactttctagcaacagccctgcctgatgcagcaaccggtgttccagctcgggctgagtgagtccggcacggcgaaaatccagccaggcaagatagctgccttcggtgtgaaacaaacgaatacttgaccctgcgttcagcccttgcttgagcagggcatagttggcctttaaatacccgagcagttcgtccagccacggttctccctcgcgatacgccgcgtcgcaggcactcatgccaagagagttcggcttgtgcacgctcagttggtaaagctcatggcgaatcctgctacggattgcgtcgtttttaatcaccagatgagtgaccggcaacccgccgaggttaaaggtcttacagggcgaggtgaaagtaatgcagaaatcggcaaccttatcattgagtaacatgataggggtataaggccgttcaccaatgaccaagtcttggtgcacgtcatcggagagcagcagcaggccgtgacgctgacacaggtcgcctatctgcgccaactcttgcttattccacactttgccaatcgggttatggggattacagaggattaatattcggctacgaggagaaatctgcgcctcgatgcgtgagatatccaatccatactggcggtcctgttcaaccaaggggacatcaaccaggcgacgaccagtatggttaatgacccggttaaaggtgccaaaaccgggcgagagaataattatctcgtcatcgggctcactcaacgttcggatgatgagctccatcgcggtaataaccgactggcacggcacaacccattcaggatcaatttcccagccatgtcgcgaggactgccaatggcaaaaaaggctgaaaaagtcctcaggccactccctgtagcccaagatcccatgctctatcgcttgctgcattgcactcaaaacctgaggcggagagcggaaatccatatccgctatccaaaggggatgaccgaggcattctccggcgtcgagccctctttgaccgctagccatttggtggaatgccgcgatcggcggtcaatcactgtatcaaaaatacacctgtcgccgtgcttgcttctcaatgagtacccccatctgggttggcaataatgcgtacgcgtccttcgaaggtgggttgccatcccttggctttttcgcccagcgtccagtggttatctggcgcgtagaggaaaagccacggcgcatcatggtggacaagtgtaaatgcctgcgccagaagcgcctgacgctgttcggcgtgctgtgtcgcggctatctcgttcagcagggcgttcagtgtttcactgtggtatccctgccaccacgggccttgacgacgggagtcgagcttttcgatatacacgcgccaggcgctggcggggcttgagtcaaagcaggctacatcgccaaattgcttgtcacgaactcgatgcgcataggctggcctgtcgtggtaaaccgtcaggttggcggtgatccctacgtccttaagctgctgggcgatgcgttcagccagcggaattgactcatcggggaacgtagccggtaatgaaaactcaagcgtaagaccttgcgcatagccggcctcggcgagcagctcgcgtgctttttgctgattataagcataagcgcagaggtctgccggtgttcccgcgtgacgtgggctcagcggacctgccagcggcgctgcctggcctgccgcaatcgctgggtcgttgatgatgtctgtcaggtttatcgcataattgagcgcctttctgatgcgaacgtcctgcaaggggccgctaaagaggttaaacagaaaaatcacgcacagcgtgcttttacgttttagaattcgaaaattatcatgtgaccctgtcacatagtgtgccggggtatcgacggctaaatccactttgccttgttgtaacagggctaaacgacgtttggcatcgggttcagcgagccagaccaatgattgagcgggcggggggcggcccaatgtgggttgaacgcttgcaaaacgaccttgccgggctgctggctgctggcccgataaggtccgctgccgattaatttaggcagtgacgacgtctctacgacgggaatatccaccagtaaatccagcaaatcgccaaaggggcttaacgtttccacaatcagcacactgtcatcggtagcggctattttcgcccctcaagatagccacgcaaaaccccttcggtgccgagttcgccgggcatgtcggcggaaagcgcgcgtcgcagggagcctgcagcatcttgcgcggtaagcgcggagccattgtgaaatatgacgtctgttcgcagagtaaaacaccagcgcagtcccttattctcaaccctccaatgcgtcgccagccagggaataaattgtccatggtcatcgcggcgcaccagagaatcatagatagagtcaatgatgctgcgtcggtcgcggatgtcagaaagaatgtggggatcggcgagcactgccgaaggttgtaccaccgtgaataccggcgttgaggctattgtcatgttctgacctgtaaaatcgcgggagaaggcggaaagacgtctccgcagcggcagtcatgccactgcggaacgacgtgattatttggaaacgtcagcaccaaaatattgattagaaatgcgctgataagtgccgtcggactttatctcagccaatgctttgttgattgcctgccgtaaatccgggttgtcttttctgataagcacgccttcctgctcggcgtttgactcggtagcaacaatcttgaccggcgcgtcaggtttatgttttttgaagtcgagatacgacagattgtcgttgatagtggcatccgcgcggccctgtgcaacaagagagacggactggtcgaaaccgtcagtaccgacaatctccgcaccgtatttacgcgccagttgtgcatagttgctggtcaaggtgtgcgccgatttcttgcctttcaggtcggcaaatgacttgatggtggtgttgttgctgcgcacgatcagtaccgcttttgacgcaatatacgggtcagagaaatcgtactttgcctgacgttctggtgtgatggacacttcgttaatcaccgcgtcatagcgtttggcgtcgaggcccgcaatcagcccgtcccatttcccttcgacaaactccgctttaacaccaatacgcttagaaatttcccgtgcgatatcaacgtcaaagccgacaagctcacccgaggtgttgtgataggtaaacgggggataggtgccttccgtaccaaatttgatcacgcctgccgagtgaatttttgccaaatctgattcggcaaaagcaacgtgagaaacgctaaattgcagtgccgtggccaataatgccgtcgctattactttcatcagtgactccttaagattattagtattgatttttttgttttagatttcccatgaatcgggaagggtattggttaacgttgaaatataggtctttgttcgtgctttcctggcctgagtgaaaatagcctctgaggtaccgctttcaacaatttcacccgcctcaagaaagacgacgttattagcgatattcgccgccaggcgcaggtcgtgagtggccatcagcatggtggtcccttcctgtgccagctgctttaataccgcgaccacctcaagcgacagctcagggtccagcgctgaggtcggttcatcacaaagcagcaccttgggcgaaggggccagagcgcgtgcaatggcgacgcgctgctgctgtccaccggagagtgtggcaggccaggcgtcacgcttatgctgcatacctaccttggccaacagcgcttcggcacgttttatcgcccgatccaacggccatttatgcactacgaccaatccctcggtgatattttcgagtacggtcagatgagggaataattgaaaattttggaataccatgccggtttgctggcttattcggcgaatatctcgtttgccgatgcgcatctttggggaaaaacgtatttcttcattcccaatctttaattgcccggcctgaggaatttccaataaattaatgcagcgtaataaggtacttttgccgctgcctgaaggcccgatcagtgcagttacgctgccttcttcgagcgtcagcgctatgtcgttcaggactttatttagtccaaaacttttctcaactccggatagcgttatcattaaagttttcctttactgcggtatttctggccagtctgatttccagacggctctgtaatgcggataaaacggagctgatcagtaaatagatgatggccgcttcggtataaagaatgaggggctgataggttacggcggcaattctttgcgccgccagaaacagctctggcacggtaatcaccgaggccagggaggtgtctttgactaatgaaataaaggtattcgacagcggtgggacggcgacgcgagcggcctgcggcagaataatccggcgcaaagactgggaccagctcatgctaatggaatgggccgcttcccattgcccctttggcaccgataatagagtggctcgaatcacctcagaagtataagcaccgatattcagggtaaagcctatcaccgccgccggaaaagcgtcgagagtaattcctgcgctcggcagggcgtaaaatatcaggaaaagctgcaccaggagaggagtaccgcgaataagccagacataaaagcggacgaaacttcgcagtggcgcggggccataaaggcgaattaatgccacaataaaacccagcgttaatcccaaagcaaacgctatcagcgtcagtggaatggtaaatgtcagccctgcataaagcatgggccaaaaagaatctacagctaaagaaaaccaagcgggcacacttcaccttccccaaacattactgttgcagcttttattgccatgttggaaataacgactataaagagagggggaaagcttatcatgcggcaaatctttgccgcatatagatagattgggattagttattcaaattttgcatttgcaattcaatgcgttatggtgattttgtgcgccttaattaacgtctacccgcttaataccgtctaccgacattatggcctcatagagggcttcaattttctgacgcggcgataatacgacgtccataacaagctcacatttatcttcatcgtcatccttttggctgacttttatatggccgggacggatacgcattttctgtagtgcaattaatacctgagggacgctttgtggtctcaggcggacttcgatcagatgatgatgaccaattaaacggttgctgatttgacgaaatacctcaagaaccagcagcgttaatacggtgccatagaccccaatctcatacagtccgctaccaatgaccaaaccaattgccgcggtcacccaaagcccggcggcggtggtcagtcccttgacgatttgtttttgaataatgatggtaccggcacccaagaaacccatgccgctgaccacctgcgcggcaacacgactggggtcaaaactgacgtggctctgattaagaatatcttcaaagccatatttcgagacgatcataaacatcgcactgccgatgccgaccaaaatatgggtacgtaaaccggcttcttttgcacgcagctgtctttcaataccgataagtcctccaaggacaccggcaacggcaattcggattaaaaaatctgtcagcataaaagacttcctccttttttatattatttcatcccaagggcgaattttttgtgatttaagaagaatttcgggttaataagcgtccactctatgagcagaataaataacaaacggaaataatctgtttctggatataaatttttaagaaaagtggctatttacttcttttcagggctcgacgttagcagaaaagctcggctatgatgactctcgttaaatttaacgaaataatcatccaggagcagggtgcatgaaaacagggttacgatttctactggctggcgtcacattggttttagctgcctgcagcagcaataaagaaagtgcggaagttcaacagcagggtaacagcttcaatattgcccatcgtaacctgagtaacagccctgccgcagcagcctgttcaatggccggaggcacgctacagctcgcacgccaactcgacggtacttcagtaggcatgtgccagatgtctaatggtcgtcgatgcggggagtcggctgtgatgagcggtgcctgtacctaaaattcctcttcgcccttagcgctgtggctgcgttggctgtcttcgctcacccgaattactgacgtgtgtcagctcatcgggactcactctgtggccgccttgccacaacactaatggctgtgaggaatactgtcttgtcctaacgctatttggcgcgatagaccagctcgtgttcgccttcgcggagtattagctgtttgccgtgcagggagactttcgcgccattctgtagcatctcggcgatgagccggtcgccgacgttgagttggctgtcggcgcaaagcatgcgcgttgaggccatttgcctgacgaagagtcgatcgttgtcgagctgtccttgtcccataaagcggttacacatagcgcctgagacgtgcatcttttcgctgaattcgagagtcggtctacggctgctctgactggctatcggtgcgccgtcaatgctgacgagttcataagggtgctgttgcaggcgttcgggggtgagtttttcctggtggggatagctgcagccactgagcgcaacggcggccagcaggctgcctaaaatcagttttttattcatcttctctcctgaagaaacctgagttgatttccattcatttcgtcgaaatggcagcgctttaaacttattaagcgctttttaacgtcatcattatatcgaaaagagacctaaaaatctcgctattgttctgattaggactgagccgttacctgattcggacattgctctccgttcgcaatttgcgagagattaccgagcgtcgtttccgcaatgctggtcaacgcctcgccggtcaggaacgcctgatggccggtaaacagcacgttgtgacaggaagacaggcggcggaaaacgtcgtcgagcacgacttcgttagatttgtcttcgaagaacaggtcacgttcgttctcatagacgtccatccccagtgcaccgattttttgctgcttcagggcgtcaatcgccgcgctggcatcgagcagtgcgccacggctggtgttgatgatcatcacgccgtctttcatctggctaaacgactctttattgagaagatgatggttgtcggcggtcagaggacaatgcagcgagataatgtcggattgggcgtacagcgtgggcaggtcgacatattccgcgcccagttccagcgccagcgggcttgggtagggatcgtaggccagaatctgcatgccaaaacctttcagaatacgcatggccgcaacgccaattttgccggtgccgatgattccggcagtacgttgatacatgttaaagccggtcagtccttcgagcgaaaagttggcttcacgagtgcgctgataggcgcggtgaatgtgtcggttaaggcacagcatcagccccaccgcgtgttcggcgacggcttccggtgagtatgccggcacgcggactacgctaatacccaactctttggcggcatccaaatcaacattgttaaagcccgcacagcgcagcgccagtgttttaataccgagtgctgcgagttcggcaagcacctctcggctggcgtcatcattaacgaatatgcagaccgcatcgcagccttcggcgttcttcgccgtggctgcacctagcataaaatcaaaaaataccagctcatcgccgtactgctgattaaccagctcaaagtattttttgtcgtaattcttggtgccgtaaatcgcaagtttcatacctgattctccaagaagtaagggaattttcgagaaataatagttaaaactagcatttgggcgtcgtgtaaacaaagggtaagcgagtgtaacgtgatttttatgatatcttgcagacgtaaagaaaatatcaggacaattcatgaggaaaggacctaaacgtctcatacagattctgctggccgcggtggtggcgatacttctgctgctggtactgctgtggaaaacgctgccgcagtggctgccatcgctggctggacactggctggcgcaggggacggcgttaagtttgtcctcggcacccatctggtcagacggacagctgcgactgccgggcctgcgctatctggcgcaggactgcgtgcttgccgacgcacaggacatcgcgctcgacaaggcgcagaaaggatggaacctcagtctgggaagcctgagcgtcgacacggcctgcctgagccaataccctgtcagtaaaaattccaactcggcgctttcactgcccgatattcagaaacagttgcctgtaggccaactgcacatcgccaggctttcaatcactccgtggcaacagtacgcgggcagtctgctaatagacaacagcgggcaaactcaggcgctgcgctatcagggggatgcactgagcttcgatgccgcgctggacaaccaacggcagctgataattagcaccttgagcctgacgccgccgggcagcgacgagcctatccagttagcgggcaagctgactctgcctgcggcacttgacaccttgccggaaagcggtgagctgcatgggcagatgcacacctccgcggtgccgcatccgcttaacgtcagcatgagctggcagaaccagcggggcgagctgcggcttgtcgagcagggtgaaaccgagccgctgctcagtttgccgtggcaattgggcaataagcagatccagattagcgacgggcagtggcgttggccgtatgcgcagcagccgctgtccggtggcgtgaacctgacgctgaacaactggagcgacaaccttaaccaaacgacgctgagcggtcggttgaacgtattgacccaaggtcacaacggcaaggccaacgcggtgttgacgatggggccgggccgcgtgggcctgctcgacagtagtattgcatttcagttaaccggtcaggccaatctggcgcaggtttcactcagtgcatcgtttcccgccacgctgaccggctcggtgcttaatcctgaaatttcgttgcacagcggcgcattgctgcgtgcctgggtaagccgaccgcgacgctaagtcttcaggacgcgcgctggccgctggcggggtgaaggtaagcgccggggcgtgagtggccctctgcaagccattatccgcgggcaggacagttactggggcaacattgacctgcatctcaacggtaaatcgcaaagcttctggcctgaccatgggcagtgggcgtttaactactggggtaagggcaatctcccgccgctgagtgggcggtgggacgtcgccggtaaaggcagctggaacgacaatcagctgacgttgacgcagctatcggccggttttgatcgcctgcattacgggctggtcaacgtcgatgcacctcgcctgacgctgaccacgccgctaaggtggatgaggccgatacctgaacgttatgccagcacacaaccgcccacgacgctgaattttgaaggcgcgattaagctggtggcgcaaaaggtttcgctggaaaatggcggctatttgccccccgcggcactcaccctggcgatgaagggcgatagcccaatgaacataacgcttaacggtcagcttgcggcgctgccaattgggcctatccgtcttaatggacgttgggacggcgagcgtctgcgcggtcaggcgtggtggccaaaacaggatctcaccgccttccagacgctgctgacgccagacctcaacgtcaagcttcgaggcggtagcttctacgcgcagtccgcgttttccgctgcgcgcggccagggatttatcgccggagggcactgggtggttaaagacggcagcatgtggctgaaagacggcgacctaagcgggctcaacttctcactgtcttatcgcctcaaggaccagaagtggcggtttggtacccggcagccggtcagtctgcggattggcgagcttaacaacctgtttgcgatgcaaaacattaccgccgaactgcagggcagttatccgtggagtgaaagcgcaccgcttaagcttacccacgttggcatggacgtcctgctggggcacattagcctttccgagttgcgtctcccgcagcatgacgcggccgtgctgaagctgcaaaaaattgacctcagcgcgctctttaccgcgctaaaaccaaaacagctggctatgtccgggcgcgttaacggcgagctgccgctgtacgtcgataatccgaaatggctgattcacgacggttggatagccaacgacggcggactgacgctgaggctggatccgcagtttgtggccgcaatggcacagggtaatatcgccaacgggcttatcatcaagctgctgcaataccttgaaatctataagtcttacgccaaagtgagcctcgacaatctggggggctgaccatggcggcgcagattaaggggttaataatattgatcaccagaaacgtgaaatcgatttgaactacacccaccaggaaaacgtttatcagctttggcgcagcctgcgttttggtgacaacctgcaggaagggttgcaacagcagctttctgccaccaaccagtttgcgcctgcgaccaaggatactgaattgaggaaggaacaatgaacctgataccgtcctgtttaccgctagtattcgcgacgctactgctcaacggatgcgtaccgcgcatcgagatagcgacgcccactgcgccgataaccatcaatatgaacgtcaagattgaacatgagattcatatcaaggtcgataaagacgtcgaagacctgttgaagaacaagagcgatcttttttaaggacaagggttatgaaatcggtaaaaggcaaaggtctggcgttgatagtgatgctttgcggctggctatgctgcggttcggcgctggcgctgaccgtcgaacaggccaaaatgcagggacgggtgggggagacgctgtcgggttatctggctccggtgaaacaggatcccgaaaccctggcactggtaaaacgcattaatcaggcccgcgagcagcagtatcaggacgtagcaaccaataatcaggtcagcaccgccgacgtagcgaaacttgccgggcaaaagctggtgacgcgtgccgggaagggtgaatacgtgcgcggcatcaacggccagtggctccagaaatagagccacgcttcacgtgattctggagtctcgttttattgttgtaataaaaaaagcgcgccttactgggcgcgcaatgtttattacagcgtctctaccgtgactcatcagcttctaaaatgagttagccaagagtgacggtaaataattaagctgcggcaacttctttaacagcaacgtcgattgctgcttttgcatcagcctgagctttagcggcaacttctggaccgtaagcaataccttccgcgaagacgaactcaacgtcagtcatgcccaggaagcccaggaacaggttcaggtatggagcaaccaggtcgcttggggtatctttatggatgccgccgcggctggtcagaacgataacgcgtttgcctttgatcagaccttctgggcctttctcggtgtatttgaacgttacgcccgcacgagcaaccaggtcaaaatagttcttcaactgagttgggatgttgaagttgtacattggagcagagataacgataacgtcgttagcctgcagctcagcgataagctcgttagacagggccagtgcttcttcctgacgtggcgtcagagcagcatcggaaggacgcagtgcgccaaccagttcgccatccaatacagggataggattagccgccaggtcacgcacggttacctgagacgcaccgttagcagcctggaattgagcagcggcgtagtcagccagttggttggtctgagagaagttagccagaatacttgatttcagaatcagtactttactcatttttaaatccttcacgtaagtgggggtaatacagggacggggcgtcccaacaatgcttgttactctattgataaatcttcgtcagtgatagtgcaatatttcgagatctacattcgaattttttgaataacctggcactcgagaaatccgcctccaactttcagtaacctcaatagcttgtgataacatagcgttattcaggcaaggccagcggccgcctctaatcaaggaatcaagaacgtgaaatcaccgctcgcggcactatcagcacaactagacgggctgatgctacgtgaccgacaacgcctgcaacgtcgtttgcagggcgcaaaaaaaatagatgacccgcaggcattgctgggactgactcaagagcttgaaacttcgctccagcaggggctgcaaaaagtcagcgcgcgtgaggcgtcacgccctaaaatcacctatcccgacaatctgccggtcagtcaaaagaagcaggacatctttgaagccatccgcgatcatcaggtcgttatcgtcgcaggtgaaaccggttcgggtaaaaccacgcagattccgaaaatctgtatggagcttggcaggggtatcaaaggcctgattggccatactcaaccgcgcagactggcggcgcgtactgtcgctaaccgtatcgccgacgagctggaaacctcgctcggcagtaccgtcggttataaggtccgttttaacgaccaggtgagtgaaaacacgctggtcaagctgatgaccgacggtattttgctggccgaaatccagcaagaccgcatgctgatgcagtacgacaccctgattatcgatgaggcgcacgagcgcagcctgaacatcgactttattctcggatatttgcgccagctgctgccaaagcgcccggatttaaaagtcatcatcacctcggcgaccatcgatcctcagcgcttttccaaacattttaacaatgcccctattattgaggtttcaggccgtacctatccggttgaggtgcgttatcgcccggtcgttgacgatgcagatgataccgatcgtgaccagctgcaggctatttttgacgcggttgacgagctggggcatgagagcaacggggatatcctgatctttatgagcggtgagcgcgaaattcgcgacaccgccgacgcgctgaatcgccttgatttgccgcacaccgagattttgccgctctatgcgcgcctgtcgaacagtgaacaaaaccgtgtgttccagtcgcacgctggacgccgcattgttcttgccaccaacgtggccgaaacgtcgctgaccgtaccgggtattaaatacgttatcgaccccggcacggcgcgtattagtcgctatagtttccgcaccaaggtacagcgcttgccgattgagccggtatcgcaggcctcggccaatcagcgtaaaggacgttgcgggcgtgtgtccgagggtatctgtatccgtctttattcggagcaggacttcctgtcgcgccctgagtttaccgacccagagatcctgcgtaccaatctggcgtccgtcatcctacagatgacctcactcggtctgggcgatatttctgctttcccgttcgtcgaagcgcccgataagcgcaacattcaggacggtgtccgcctgctcgaagagttggggcgattaaccctgccgagcacggtcgctataccctgaccgaacagggccgcagcctggctcaactgccggttgacccgcgactcgcccgtatggtgcttgaggcgcagaaaaacgcctgtctgcgcgaggtgatgatcatcaccgctgcgctgtcgattcaggacccgcgtgagcgtccgatggacaaacagcaggcatcggacgaaaaacatcgccgctttgcggataaagattccgatttcctcgccttcgtgaacctgtgggactatcttcaggagcagcaaaaagcgctctcttcggcacagttccgtaagctgtgccgcagcgattacctcaactatttgcgcgttcgcgagtggcaggatatctatacccagctgcgtcaggtggtgaaggagctgggactgcgtatcaacagcgtggccgctgattatcgcagcgtgcactgcgcgctgttgaccggtctgctgtcacacgttgggcagaaagacgtagagaagcaggagtttaccggtgcgcgtaacgcacggttctctatcttcccgggttctggtctgttcaagaagccgccaaagtgggtgatagttgccgagctggttgaaaccagtcgcctgtggggcgtattgcggccaaaattgagccagagtggatagaaccgctggccaaacacctgctgaaatacagctacagcgagccgcattgggaaaaagcccagggcgcggtgatggccaacgaaaaggtcacactgtttgggctgccgattgtcatggcgcgtcgcgtcaactatggcagcatcgacgccgtcctctcgcgtgagctgtttatccgtcacgctttggtggagggtgactggcaaacccgtcatgccttcttccgcgacaacctgcgtctgcgcgcagaagttgaggagctagagcataagtctcgccgtcgcgacattctggtcgacgaagagacgctgttcctgttttatgaccagcgcatcggccgtgaggtggtgtccggtaagcattttgatacctggtggaagaaacagcctgtcgacagcctgaactttgaaaaaagcatgcttatcaaagagggggcggggaaaataagtgcgcatgactacccgaacttttggcatcagggaaatatcaaactgcgcgtgacctatcagtttgaacccggcacagaagctgacggcgttacggtacatatccccttgccgctgcttaatcagattgaagagcagggcttcgactggcagatccgggtattcgtcgcgaccttatcatggcgctgattaaatcgctgcctaagccagtgcgccgtaactttgttccagcgccaaactacgccgatgcgctgctgggtcgcgttacgccgtttgaactgccgctgctggaggccatggagcgcgaattacgtaaaatgacgggagtgacggtgtcacgagatgactggcagctcgaccaggtgccggaccatctcaagatgaccttccgcgttgttgacgacaaaaacaagacgctgcgtgaaggcaagagtctgacagcgttgaagtcaacgctgaaagaacaggtgcagcaaacgctctctgcggtcgctgacgacggtatcgagcaaaataacctgcatgtctggagcttcggaaccttgccggactgctaccagcagaagcgcggcggttatgaggtgaaagcctatccggcgctggtggacgaaaaagacagtatcgctatccggttatttgacagcgagcttgaacagtcacaggcgatgtggcgcggtacgcgacgtttgctgctgttgaacattccttcacctatcaaatacctgcacgagaagctgccgaacaaggcgaagttgggtctttatttcaatccctacggcaaggtgttggacctgatagacgactgcatctcctgcggtatcgacaaactggtcgccgagtcgggtgggcctgtatgggacgaagcccgtttcgccaaactgcatgaacacgttcgcgccaatctcaacgacaccgtggtgacgattgccacccaggttgagcagattctgaccgcagtgttcagcattaataagcgcctgaaagggcgaattgacatgacgatggcgctggcgctgtctgatatcaaggcgcagatgtcgggccttatctatcgcggttttgtgacgcagaatggctggaagcgtctgcctgataccttgcgttatttacaggctattgaaaaacgcatggacaaactggcgatggatgcacatcgcgatcgcgcgcagatgcttaaggttgagagcgttcaacagaagtggcaacagtggttcaacaagctgccgccggtgcgtcaggccagtgaagaggttcaggaagtgcgctggatgattgaagagctgcgcgtgagttacttcgcgcagcagcttggaacgccttatcctatctcggacaagcgtattttacagaccatggagcagctggcttagtgcgccagctggttatcgcttaactcgactaacgcgtccctgattgccggaacggccagggcgcggttatccgccagataacggtcctgcgcggcaggcgccgagctttgaataccaatcagcgtccatttaccgtcttgcttaagcagtaacggcgagccactgtcgcctggcaaggtatcacaacggtgcgacatcacgcccggctgtgcccatccggtaattaaacaatcctgatgactatagaggtcatcgaggtgatcttcagggtaacctgcctgcgtcactttgcggtcattggccttcagcgccgccgtcagctcgtcacgcgtgccttgccacaggggcaggggcttgataggcaactttcgtttttcatcggtaatacgcaccagcgcgaagtcatacggcgcggcttttggtggcactatccagccatcaccgtcggctttgagtttcttgcctagcgcaggatcaaccagcgtttgcagtgacgtaatctgatagcgccatttctcatgctgagagataaaacgcagagcgatgactttgtcgatgttacccgggggcgctagcacgcagtgtccggcggttaggaccaagtgctcggaaatgagggtcgcggtgcagagattaccgcttgccgtttcaatctgacctatcgcctgccatggccagcttttaacatcgctgacgtgggtacggtgatcctggccaaaaaatagggcggttttttctttaaggctgattgtgtctgagtcgctatccgagtctgatgaatcggcatgagcaggagggcgaagcagaggaagcacaagacaagcggtaaagctatgcgcatatcgttttgaccttaagtgcgggattgactgagagtcaattaataagatgatgattatagctgtatagagcttattggtaacaggaggttaagataactcggtaataacaatttatctcggtattaattggattttttgaattatgggttctgactttccggattagttgaaaaacgttttcctctagaagtagaagaacaacgtaatcaggcctaacaggatcagtgaactcagggtaatttcgaacaggtagcgtcgcagcatcgtccatcaatacctcaagattgcctaattaagataaccccgtgttcatatttcgctagggggtctaaggccggagaaaaaaacacccggcgaaccgggtgtcaaataatcagtcttgataatggtgagacgagttgctcacaaagacttattacttagctgctggagcagcttttttagcgtgttttttcacgtgttttttagcagcctgcgctttctgagcaactggcttcttagcagcgtgttttttcacgtgttttttagcagcctgtgctttctgagcaactggcttcttagcagcgtgttttttcacgtgttttttagcagcctgcgctttctgagcaactggcttcttagcagcgtgttttttcacgtgttttttagcagcctgcgctttctgagcaactggcttcttagcagcgtgttttttcacgtgttttttagcagcctgtgccttctgagcaactggcttcttagcagcgtgttttttcacgtgttttttagcagcctgtgctttctgtgcaactggcttcttagcagcgtgttttttcacatgctttttagcagcctgagctttctgtgcaactttcttcttggttgcgtgcttcttagcgtgctttttcgcagtgtgcgttttagcaactggcgctttagcagctggagcaggagcagcagtagtggtggttgcagcagcagctggagcagcggtagtttcagcagcgaatgctgcagaagacaggcccattgcagcggcaataaccagagctaatacctttttcatcgttaattcctcagaattgaatttatgtatccaccccactgcggggccggtaggagaatactaggcttctgagtgtctgttgtccgttagtgattggtttcggcgtgtaaccgtatgtacaaactgtattatttatatttatcagttggttgcgattttatgtacaacagaaaacatacaaattacgctgcttagttacaacacacggcagattcaggttacctaagcgttttgagaagccataaatcggttaaaatcaggggatctgtaacaatgaaataagaaaaatcttagcagaatggggcggttttcccgggccatgagaattcattgcccgggaagtcacgattattacaggtaacggctttcgagatgtttacggaagaactcggtatttaaggtttcacccgtggcattggcaattaactggtcggtcgagaagcggctgccgtgctgccagatattctggttcagccactggaataatgccgtcagatcgcctcgggctatatcgtcctgtagcgttggaatcgctttattcgccgtctggaataactgtgctgcatacatggcacccagcgtataggtcgggaaataaccgaagccaccgtcggtccagtgaatatcttgcatacagccgttggtataattgccgacggtatcgaggcccagatattgctgcatcttactgctccacagtgccggaatatcgtcgacttcaatttctccttcaataagcgcctgctcaatttcataacgcagaataatatgcgcagggtagctgacctcatcggcatcgacgcggatcaggcccggctgtacacgttggttaagcttgatgaagttatcgacgtcgaggccatgacgctcaccaaactgctcggtaaccagcgggaaaatagatttcaggaaaatgtcgctacagccgagctgcatttcaaacagcaggctttgcgattcgtgaacgcccattgaacgtgcgttggataccggctggcccagccactctttcggcagattttgctcatagcgcgcatggccggtttcgtggataaccccatcatggcggtgatgaactcatcttcgttgtaacgcgtggtaatacgcacgtcctgcgggacgccgccgcagaatggatgtgcgctgatatccagacgacctgcgtcaaagttgaagccgagacgcttcatgacgctaaggcccagctgtttctgactgtcgatagcaaacgggccctgcggctgaacaaactgtacggatttctgtttctcaaccaccttttgcaacaactggggcagccaggttttcaaatcaccaaaaataccgtcgagcttgtgggcggtcatgcccggctcatagaggtcaagcagagagtcataacggctgatacccgctgcttcggcgcgcagtgtcgcttcttcacggctgagtttcactacttcacgcaggttatcgacaaaaccttcccagtcattcgctgggcgttgacgacgccatgcgtgctcacagcgggcgccggcgagagatttcgcttcaaccaggctctccggaagcagggcggcgtgctgatactggcgggccatttcgcgcaggttagactgctcgagatcgttgaggtcttcctgcttcgcctgctcaagccattcgcccactttgcccgcggtcaaaatctggtgctgaagaacgctcaattcagccaaagcctcggagcgagcgcggctgccttccggtggcatcatggtttgcatgtcccatccggcgatggacgaaagatgactgaaacgcgacagtcgggtaaaggtagcgcgtaactgtgaataagctgtagccatgctgaactccgtgctttcaaaataataaaaatgtgggggaagtttgccccaggcccgatttattgcggttcaatagcgagattaaatgtcggtttaatcggccaactaaagcggatgcttgcgccgccgagcgggctggaatcaaccatgacgcgcccctgataggccacggcaatcgaatgcacgatggccaatcccagcccgcagccgccggttgcacggtcacgacttgggtccagcctaacgaatggctcaaaaattctcaaacgctcttccggtggaatgcccggaccatcgtcctcaacctgtaggttggcttcttcaccctgtaaccacaggctgatacgcaaatgcttatgagcgtagcgctgcgcgttgttgaccagattgtcgagtacgcgctccatcaggcggaggtccacaccgccgaagtcggccggtttagtcacatcgagttctatctcatgctcggtatttaccagacggaagtcatcggccttgtcttcaatccattccggcaggttgattttggttaaatgcagcgcgacctgtggccggtcgagacgggcgtaggtcagcagctcgtcgatcagcgactccagctgaccgatgtcacggtttatggcctgctgttcggcctctggcagattttcactgatggcaagccggtaacgcagccggaccagcggcgttcgcagctcgtgagcgataccgtcaataagctgcttcttgctcgcaataagggtattaatgttgtcagccatctggttaaaggcaattcccagacgattgaggctcgacgtcgagtcaaaattggttcgttcgtcgagatgaccattgccaagccgctgcgccgagttttctaacttaagcaggtcctgccagtgtggacgcatccataaaaataccggcaacgctaacgacaggccgatgaaaatcagcagccccaaatcgagcaagcgcatttcatgcatgtaaaacagatatggaatcggcccgacgaccaaaacatagttacttcgcggcacgcgctgtataaaggtgtattcgctgtcgagcgccacaatttcgccgtcacgcagttgggcgtcgagtgccgggcttagcttgcgcttgcccagtggctcgatatgcagtttgaacgagaggttcagctcaagggtgctgatggtcttgttccagtctttgataggaatttcacgcagctcgcttcgcatcagatagagcgaacttttcatcaggtcgttcatcgactggcgaccggtgcgctcggcggtgactttgtaaaccagtccgaccagcattgccataaccaggaaacacaccagcagcagcaggaagaactgaacgaaaagttttctcattcctgcacggactcccaggcgttaggggcaaacagataacctttattacgcaccgttttgatacgaaatggttcaagcgcgttgtcgtaaagtttgcgacgcaggcgagagatagcgacatcaatgctgcggtcgagcccgtcatagctcacgccacgcaggttgagcagcagcgcttcacggtccatgatgcggcctgcgtgcgtggcgagctcccacagaaggtcaaagtctgaggttgaaagggtaatcgtttcttcacccagcgtgacttcgcggttgacgggatcaatgcacagctggccgaagtgcagggcgttgcttttctgcatcggtttgctggttttctctggctcggcggtggtagacgtcgggcgctggcgcaggtgcagccgaagacgcgccagcagcacggccggtggcgttgttttcagaatatagtcattagcgcccatctcgagcgacaaaatatggttcatgtcgctgtccagcgaggtcagcaacacgatggggccgtcataggccgggcgcaggtcgcggcagagggtcatgccgtctttaccgggaagcatgatgtcgagtaataccaaatcgggtttttcgaccgcgattctgtcttgcgccgtgtctccgcgaggttcaataagaacttcaatgtcatgcttgcccaaataggcagcgatcagcttacccacctcggcgtcatcttctacaaaaacgattttattcattggtttgctgtcaaggtgaaaatcgggttccagcatagcgcgagcggggcatcaacgccacgcccgcagtagacttcgttcatattaataaacacaggcaaccgctgcgtcagcgcaatcttctgccgccgtcaacgccgagtgttttgccggtcacatacttactgcgcatgatgtaatcaaccagattgactatctcactttcgcccggctcaatcttcattaacgatttatttaacgcgtgctcgcggtatgaggcgtcgtcctctgggttaaagaggattagcgcgggtgcaatggagttaactttgacctcaggtgccagctttcgtgcaaatgagagcgtcatattatccagcgctgccttgcttgccgaataggcgatgtgctttttactgcctttttccaccacgaaatcggtaatgtgaatgatatcggcgccggccgtgccctgaccccgcagacattcttccagctcgagattgagcaggtaaggggtgtaaacgtggatttgcagcatcatcgccatcgtatcctgtggtgcggtgtctggcgactctgcgacccatgagctggcgttatgaatgatggcacgcagtttaccggtttgggcacgcactttttcagcaaaggcgagtatccctgcattttctgaaaaatcggcctgaatgcagcatgcgcctttcttaatcagctcctcaagggcagggtaaggttgccgataactcacgattaccggaatttttttctctagcatcgactcagccagagccagtcctattcgcttggcgccaccggtgataagtaccggtgcagaagggataaaatcggtcaagtaaagctcctgaactcgctggcaaagcatcaataaactatgtcattatataaagctatgccattatatagatgattgtgtttatcgtttcaaaacattatcttcaaaaagtaaggtcttttctaacacacgttagacgggttagcactggccctgagaggaatggagatggctgatagtcgcctggtacccgatgcgcgcagtgaaaaagcgtcctttaactacatggaatacctgtccgcatcgtgcaagaagcaatggagtttcctcgatgccatccacggcgtattgcctttttttggcatggtgttgaggtcgcgaagcacagcccaggaaaaatccaaacaagacaagcttaatgcattagcgttacaagttgtctcgacgcaggtgagtgacgaaatcaatatcgttcgactgattgagttggcgcagcagcagaatatttacagcgttgatattcatttgccttatggtttgaccgaagagcagctggctgccattcaggaagagtgcaaacatccgctgaaattgacgcaacaggatgagcatttagcggtagaaatactgcaagacccctcaaaacattaatttcactgcccctcgggtcgttgattatttcagacctgaggggagcgttatccctacccatgctgttccctgcctgacgctatcaaggatacaaccaaaggacgtgatgcccttcggctgtagccactgcgcgctcattaaaacttatttgaacaggtctgctgtgacggtgaggttacccccgcttttgttctgccactgacgcgtgatgtggtagaacttagcaccctgatccgccgcacgcttggcgacttcttcagagacgtcggtgatgctgttgaagtggccggtgaaggtcacggtagagaacggcgtcatctgtgccgcagtcacgttgttcacttcttcgattttcttgccgtctggcagagtgacagagtaacgcttaccggttgaagactgtgtctggaagaacaggcctacatcgcggcttgggctttctgaagatgccacacccgggatttcaactttcttggctgcggcaccgccggctgccagcgctgcacgacctgcgtcagagttgtacgggatagcatccgggctttgagtcacacgcttacgcgcatcttttttgtaaacaaaggcagtcacgtactgattgcctccgttattggcatcaatctggcgtacgatgaagaaggagtaagcccctttggcttttgcggcctcagcaatagcctgaatgacgtcaggctggctgtggaacaggccgctgacggtaacggtatcgaaaggctctaactcataggccacttcttttggcagctgtttcacgccgctaacgccgttaacgctgttaagcaccggctttgggctgaccttaggcgcatctttatgataaaggtcggcaactacgcgccagttgccgctttcgcttacactgttagtgtccagaatatagaagtaatccgcgcctttatcgtcggcgcgtttagatgcttcatcagaggcatcgcccagattgttaaaatggccagtaaatgcaatgcgatcaaagggcttcagggcggctgctttctcgggactgatctcttctgccgcctgtgctgcagacaaaacagagaattgcgagattaacaaaacaacggccgatgcgatgatcgttttcgtctgcttcataaaaaatcctttcaccttgcgcagtaatgttgaaacatgctgaattattgatgtgtaacagattagctcccgattattgcatgtaataatggcgagcgctttagtaattttttaaatgctttaagtctgtaatcgctagcctggtcactttattttgccctgataacttatataagtttcgtgatggagtaaataagtgaaataaatgttaattatttacatttttctcacttttgtgcccgccgttggcgaatagacatcatcatacaagagtgattcatctggtatttttacctcattgaagtgaattaaatatgaaaattaccggctttgcagtgctatcgaggcttatgccgtttttaggtgatttaatcctcattaatgcggtttccttatagcttattaacccgatattcagtaggttatagccggcctgaaaattccgtcagtatttcggcgaaacaagccgacaggtttttaatttttgtatctacatcgatgatatgcatcatcaaataaaagggtgaagggaataattatgcgtattggtataccaagagaacggttgaccaatgaagcccgcgttgcagcaacaccgaaaacggtggaacaactgctgaaactcggctttacagtcgccattgagcagggcgcaggtaaactggccagttttgacgacgcggcttatgaagcagccggtgctacggttgaagcgggagacgccgtctggcattccgacatcgtcatgaaggtcaatgcccctctggacgacgaaatcgaaaagctgcaggcaggctccacgctggtgagctttatctggccagcccaaaatcctgagctgattcagaaactggctgaacgcaacgtcactgcgctggcaatggactctgtaccgcgtatctctcgtgcacagtcaatggacgccctcagctcgatggccaacatcgcaggctatcgcgcaatcgttgaggccgcacacgaattcggacgcttctttaccggtcagattacggccgcaggtaaagttcctcctgccaaagtgatgatcatcggtgcgggcgttgccggtctggctgctatcggtgctgcgggcagcctgggtgccatcgtgcgcgccttcgatacgcgtcctgaagtaaaagaacaagttcaaagtatgggcgccgagttcctcgagctcgacttcgaagaagaagcaggcaacggcgacggctatgccaaagtcatgtctgaggcctttatcaaggccgagatggcgctgtttgctgctcaggcggaagaagttgacatcattgtcaccaccgcgcttatcccaggccgtccggcacctaagctgattacccgcgaaatggttgaatccatgaagtcgggcagcgtgattgttgacctcgcggcgcaaaccggcggcaactgtgagctgaccgtcgcggataccatcacagtgaccccgaacggcgtgaaaatcatcggttacaccgatttgccaagccgtttgccaacccagtcttcccagctgtacggtactaacttagttaacctgctgaaactgctgtgcaaagagaaaaacggagaaatcgagatcgatttcgaagataccgttgtgcgcggcgtgactgtggttaaaaccggcgaagtgacttggccggctccgccgattcaggtttctgctcagccacaggcggccaaggttgaagcccctgtcgccaaagaggccgccaagcctgcctccccatggaccaaatacatcattatggcgattgccgtggtgctgtttggctggttggccgatgtcgctccgaaagagtttctgtcccactttaccgtcttcgcgctctcctgcgtggttggctactatgtggtctggaacgtcagccatgcgctgcatacgcctttgatggcggtaaccaacgcaatttccggcatcattgtggtcggggcattgctgcagattgggcacggcggctgggtgagcttcctgtccttcgtggcggtactgattgccagtatcaatatatttggcggatttaccgtcactcagcgcatgctgaaaatgtttcgtaagaattaaggggtagcatatgtctgggggtttagttacagctgcatacattgttgccgctattctgtttattttcagccttgcgggactgtccaagcatgagacgtccaagcagggaatatctttggcatgaccgggatggcgatcgcgcttatcgtcaccatccttggccctgactccggtcacgttggctggattattctggctatggttatcggcggcgctattggcatctatctggcacgtaaagtcgaaatgactcaaatgccggaactggttgcgattttgcacagctttgtcggtctcgctgcggtgctggtggggtacaacagctatctcgaccacggcgcagtgccgatggacggagtgatggaaaacatccatctggtcgaagtgtttctcggtatcttcatcggtgctgtgaccttcaccggatctattgttgcgttcggtaagctgcgcggtattttttcttcaaaaccgctggctctgccgcatcgtcacaagctgaatctggcggcgctggtggtgtcattcctgctgctcgtcgtgtttgtccgtgctgaaagcgtggggacacaggtgtttgcgctgctgattatgaccgtcatcgcgctggctttcggctggcatctggtctcgtcaattggcggtgcagacatgccggttgtcgtttctatgctgaactcctactcaggttgggcggcagcggcggcaggcttcatgctgagcaacgacctgctgatcgtgaccggtgcgctggtcggttcttcgggtgcgattctgtcttacatcatgtgtaaggcgatgaatcgttcgtttatcagcgttattgccggtggtttcggtaccgacagctcctcgactggcgatgaccaggaaatgggcgagtatcgtgaaattaacgcggaagacgtggcagatatgctgaaaaacgcctcctcggtcattatcacccctggctacggcatggcggtggcgcaggcgcagtatccggttcaggatattacggctcgactgcgtgccaaaggggtgaaagtgcgctttggtattcatccggtggccggacgtctgccaggccacatgaacgtactgttggctgaggcgaaggtgccttacgacatcgtgctcgagatggacgaaatcaacgacgacttcagcgacaccgacgtggtgctggttatcggtgccaatgacaccgttaacccagccgcgcaggaagacccacgcagtccgatcgccggtatgccggtgctggaagtgtggaaagcgcaaaacgttatcgtgtttaagcgttctatgagcaccggttacgctggcgttcagaacccgctgttctttaaagagaacacgcagatgctgtttggtgatgccaaagagagcgtcgaagggatcctgcgcgcgctctaagcgatgctgtagtttccagataaaaaaagccagtcgcgatgactggcttttttattgcccaaacctaaccgaaaacgctattcggcgtcggtatccttgatatttgctccgctctcttcgagagaaatagggcagacaaaatcgtcgggcttaatcgccagcaggtcgcatttcaaatgatcgataacctgctcggtagtgttgccgagaaacgcggcagacagtcccgtgcggccaatcgaccctaagactacgacgccggcttgcaaatgctcagccagatcggggatgacttcttcaggcagtcctttttcaacgtgagtgtatttctcgtctagctggaacttttgtcgtaacgctttcatggcaatcaagtgctgaccgcgaatggcatcgttataaacgctagggtcgaaatcaggcagttcgatggcaatgttgataggggttacggggtaggcacccaccagatgaacctcggtctggttaacgtgcgaggcgacctcaagggtttccttgaccaatttaatgttcagcgggtcgtgatagggctcttcactcgacaggttgacggcaaccaccgctttaccgccctccggccaaggttggtctttaaccatccacaccggacaagggcatttgcgcagcaaattccagtcggtaggcgtaaagatgacggactcgaggcggtcgtgctggtgggccattttcaacagcaggtcgtgctgtccggcaaggacctcgtgaatgatggcttcaaagggtttgttgtgccataccactttaatgtcgataggaatgcctgcttcgacgtagtagtggcactgttctgcaatccatgcgcttctttcgcttatcacaccctgacgcatggcggtgcgttcttcagggacagcatggtggtcatttcgtaggaaaaatcatagatcgacaggaaggctttgatcttcccaccgttgcgttgaacaagatagaccgcgcgacgcagcgccggctggtcatcctggttggggtcaatagcgaccagaaggttctgatacttggccaaaggagcctccttaacatctgtgattgaaagcgcacagggcgccattttctcaaggaaagtcaaaacccgttaaaagagaacgcaaaagagaagccaaatgcaaacgcttaagctgtcgccttatcgatggacgaaaagagcccgcgttatagttatagagtaaaccaggatggacaaacagaacagaggataaattgaaccggatcaataaagtaaatcaataaaatagacacattattgatccggtatttgacgcctcgggcagggtgcccgaaagcgcagctacgaaaccagcgaaatagggtttccggccagcaccgacagcgcgttatggtcttcaatcgtaatgtatttaccttttacgctgagcatgccagatttctggaaacgcccgagcaggcggctgatcgtttccacggtcaggccgaggtaattaccgatatcgccgcgcgtcatcgtcaggcgaaactcgcgctgcgagaagccgcgctgtgaaaaacggcgagcaaggttatagataaaggctgacaggcgctcttctgcgttctttttggaaagcagtaggatcatatcttggtcgcctttgatttcgccgctcatcagccgcatcatttgctgacgcagttttggcagttttccagaaagatcatcgaccgtttcgaaaggtatttcgcaaaccattgaggtttcaagcgcctgcgcaaagcttgggtgttgcagacccgcgatagcgtcaaagccaaccaggtcacccgcgaggtggaaaccggtaatctgctcgtcaccttgttctgtgatggtgtaactcttgatggtgccggaacggatagcatagagagacttgagttcgtcaccggctttaaaaagagtctgccctttttgaatcggttttttacgctcgataatgttgtcgagttggtctaactcatgctcattcaaagtgaagggaatacacagctgactgatgctgcaatcctggcagtgaattgcacaaccaccagattggatacgccgaataatacgtttttccgggatcataggtttcgctctcgcaatattgatatgcgtcaattttaacatcttttgcaatgagtgataagtgtaagttttgtcccgaaagaggtatttagttaaaaaccacgatttttaaggggttttttataaatattttttgatctaacgacaaataagcggtcatttcggccagaactcttaggcgaatatataaaaagagtctcgtttacgtcaatttttttgcatcccggcaacgcggattggagcaaaggttgatcgatttttgcaggcggagtaaacaggccgggcaaaataagcgcaggcgcgacgttaatttaaaattcattttattcagtaagttgtgattttcacgcgctgtgaaatcaaattctatgccaacattttagctttgtcgggtatttcgtactaataaggattgatgttattgcaatgttatttttgacaggccataagcaggaaatgtgtcaataagtgcaggtgaaatggcgaaaataactcgtgggagttattgaccgctggcggctgaaattaattttaatcaaatagggttttaaatcagcgggtcacaataccttacgcgcagaaattatgactattaatttatcgctgattaattgcggcagaataatgtaataaaattgtgaacggataaatctattaagcagtagggcgtcacaataaatcctgtgacgcccggttttatcttaaacgttacctttgttgtcttcttctaccgcatcgtgaatacgttccagcatgtccgggaacgccgactgaacgcggctccagctcggaataaacggcttttcactcggcgtatcgacgaatgccaaaccggcctccatgattgcccctgagaacagctcaaccgccgactcttcgctgtggcggtcaaacttcaggccgttcattcgcgcgtcatgctcgaagccgtcaatcatgtccaacgcgttgcggtagtaggtggctttgagaatgcggaacgattcgctggtgatcggcacgcccagaatcgccatcttgcgatacagtgccttggtaatgtcgatactcatgcgctgtaggccattgctcgcgtcatcttcagacattggctgatgtttgtggtcatagttatcggcgatatcgacttgacagatgcgcttggtggccgtattgcgatgcagctccgacagcacgccaatctcaagaccccagtcactcggaatgcgcaaatcgttgagtacgtgggtacgcatagcgaattcgccggagaggggataacggaagctgcgcaggtattcgagaaactcggagtttccataaacgatttgcagcgatttcagcagtggaaacaccaacaggcgtcccacgcggccgttgaacttaccgtcagccactcgcgcgtaatagcccttacagaaatcatagtggaaattagggttcgcgaccggatacatcaggcgagccagcatgtcccggctataagtgacgatgtcacaatcatgcaggccgaccaccgtggtacggcgcgaagcgagcgtgtaaccgacgcaaaaccacacattgcggcctttgcccggttccattggcgaaaggttctctttctttaactcttcatcgatcgccttcaggcgtgggccatcgttccacaaaatacggtgacgttgtggcaggcgagagaaaaattcgcgtgcaaatagaaactgatcgcggtctgcgcgatctaaaccaatgacaatctcttccaggtaaggaaccttggtcaactcgtcaacaatcttgctcaacgccggcccttcaagctccgagaacagagaagggaggataagccccatcgagcgtcgacccgagaacacctgcagatcgtattctaattcttctaattttcttttcgtgaggttgtgaaaattagtaatgataccgtcctgataaaattcgctcataggcatcctcaatttatttaaaagaacatcaaaaaaaccacacagggcaaaacgtgaatctgttaacggtcgataaggtggtccagtccctctttccagccttcgggaccgtattgttcggtgcgaaatacgtttacaccttctttgactggcattttatggtcatggtgacctcgaatgaccaccgcataatctgaagcattaagcatgccaatatcgttggggccgtcaccgagtgcgatgctaacaacgggttttccggccctctctgcgtagcagtcgctcagccatttcactgccgggcctttccctgcatcggcccccatcacgtgccagaagcgaccaccgcgcgtaagagccagtttctcttgatgcagatatttttcgaaacgggcgaaatcgaggctgttaccaaaccagataatcggttcagaggcttcgcgctgcatggccagtttggcattctcaagcggaagcccggtccagtcgatcacctgctgggcgttaacgtcaccgaaaccgcgaaattcaaaatcgtagcgctggcgtaacgcgaccagaacatgacgaatgtcttcgtaagcggcgccaataatgtgccccgaagtcgacgattcgtgcttttgccaacggtctggcaaacctatcaacgcaccattttcggcaatgaaaggtacctcagtaagttctaactttctctggagttctgcgacctcggccgccgttttgctggtggttagaaccaccggaaccttcgccgcactcagtgtgttcaaccattcctgcgctggctgccagtcgtagctgtggtggtctagcagcgatccgtcgaggtcagtaaatacaaccagattgtcatcaaggtacggcatcatttctcctcaaaatgaatggaaacagaaacgaccaagcatcagaattattccactccagggcctaagtatagccctaaatcaataagccatttttttgagcgataaataacagactgtggaacagggagttatatgattcttatctttgaagcggtgagagcggtcgggcaggatattgcagcctgcacttttttctatacactcagttcttaagcctgaccgtcaccgcttcagggtgccggccaggtttgagaacgtgaaaatctaataaaacgtcgggagggtgacgatgaaaaatgatgatgaaaatgatgattttctgttttcacaggaaatggccggcgtccacaaactctcagataacaatcaggtggtttacctcaaaaaccatcaaaaagcggcacggcctcagacgccggacgtaactgaacctgaaaatattctgactaccggctttcttgacgtcatcgactgcgccgaaccgctggaatataagcaggcgggcgtgcagcagggcgtcctggataagctgcgtcaggggaaatatccgctcgaagccagccttaaccttctccgcaaaccggtcgagacctgtcgtcaggaactgtttagcttttttctgcaggcacaggcgcagaatctacgcaccttgctgatcgttcacggccgtggcaggcatgacgagagccatgccaatatcgtgcgcagctatctcgccaaatggctcaggcagcttgacgaggtgcaggctttcagcgtggcaaccggcaaggacggcgggcaggagcctgctatgtcgcgcttaaaaaatcgcctcaggctaagcaggagaactgggaaaggcacgccaaacacagtcgttaaatctaaattaaacaatcgggaagtaacattttaagcgttggcaccgttaacgcagggtttaacaaaaactgtatactcttggccctacctaatttatccctatgttaaccctgcgttttgctaagtgagtttacatgctgttcaatcgccaccttttgcctgcctctcttgttctgagcggaactgcgctgctttgcgcctgcggtccaaccaacagcccaagcctgtcggcagtcgttatctccggtcaaaccatgggcacctactatcgcgtcagcatggtcgggctggataaaagccgcgaaccggagttgcgcaaacagattgaagaccagctgaaagaagacgaccacgagctttcaacctataagaacgactctgtgctttcgcgctttaaccaatataacggtaccgatccgcagcctgtcagctccggcatggccgacgccattgtcactgcgctgcgcatcggcaaaaagaccggtggcgagatggacattaccgtcggcccactggtcaatctttggggatttggcccgaccaaagagcctgtcaagatgccaacccaggagcagatagatgccgccaaggccgagattgggctttcgcatctcaaggtcatcgagaccgtggacggagactatttgcagaaagacaaagccaatatgtacgttgatctctcaaccgttggcgagggttatgccaccgatcaccttgcgagactggtagagggcaacggtgtcagcaactatttggtctccgtgggcggcgcagtcgtttctcgcggcagaaaccctgaaggcaaaccgtggcaggttgctatccagaaaccgaccgacaaagaagatgcggtggaggccattgttgacctgcaggggatggggataagcacctcgggcagttatcgcaactactatgagctggacggtaagcgcctctcgcacatcatcgaccccgaaaccggacgccctattacccacaaactggtctcggcaacggtgattgcaccgactgcactcgaggccgacggctgggatactggcctgatggtgttaggtactaaaaaagccctggcgttggccgaaaaagagcatcttgcggtgtatttgatcactaaggaaaaagacggcttcaaaattaccatgaccccgcagttcaaagcctatctgcgcaaagccgagaaataaaagtaacccatctctacaagcctgcgtattcttgtcatgactcatcgagcccctgtgagagcgtattttgccggggctcgacgtcttgttttgaatcccactgcggatgttaagtaaactgaactggctatttctaagatgtgtcttaaaagtggtacacaaagtcctgattctgcggggttgtcgtccctatgcaacgatttttttacaatttaccttttggtcacctctgccaagttgggcactatttggcgtcagggagagctttactgcgtatcgtcaataaaacgatctcctgcatcgtcttcaggaatgcggctggttggtctctgagttgttgaagtcattaattcatttttaatcgtcttatggttgttatgtcatttttttcccgcattgttcgttcaggatttgcccgtctcaccgttccgctgtttagcctgctgtgtgtcacttcctacagcgcctcggccaaggtttatccccctatgctttcacggtcggtactggtcatgaatgccaccaacggtcgcgtgctgtatcaaaagaacgccacccgtgcttaccccatagcctcgctaaccaagctgatgaccgcgatggtggtgctcgacagccaccagtcgctgaagcaaaaaatcaccgttacgcccgccgacagagacttactcaagctaacgcattcacgtttaacgataggttctgtgctgtcgcgcaaggacatgctgcacatcgcgctgatgtcttcagagaaccgtgccgctgccgcgctcagtcgctactatcccggcggccgccgtgcttttgttcgccagatgaatcgtaaagcgcgagcctatggcatgacccacacgcatttttatgatccgaccggattaaccccgcgcaacaccgcctcggcgcatgacctggcgattatggccaagcacgcgtaccgctatgcgcttatccgccagctttcgaccgataaacgcgatgtggtgcatccggggcacggccagctggtgtatcgcagttctgacgggctaattaacaataaaacctggaatattgtgctacagaaaaccggctataccgatcaggccggacactgtttgattatctatacccgcatcaaggggcaggacgtcctgatggtgataaccggtgggccgcgcagttactcgcattatcacgatgcgctcgggctcaaggcgtggttgatgcacggcaatctgtaaacgcccgttgtactaaccgggcgttgaaagggctcgcttgaagagggacgttatttaggcagactcatcaattcaaacagcaccacgctgcgtgatgggcaggtgtattgactgccaaactcgaagttgcgctcgttgatgtcgtctggttggtaggtgtcgagaatatgccgccagctttcgccgtgtgccacggaaggcagcgagaacaccacgtcctcgtgagccgcgttaaacaggagaagtaccgtgctcagtgaaccatagcgagtcaaaccggtaggctgagcgcgcccgtccagcaacataccaatgctcttggcgtgcgcatctccccaggcttcgtcattcatctcttcagcattcggctggaaccaactgacgtcttttacattcagtttttcatgcacctgacctgtcaggaagcgaccgcgatgcagaataggaaacctggcacgcagggcaatcaaccgataggtgaagaggatgagtgaacgccctttgtcctcgatattccagttaacccacgcaattggcgtgtcctggcagtaggcattgttgttgccgttctgcgagcgggcaaactcgtcgccggccagcaacattggcgttccctgcgagaaaaacagcgtcgccaacatgtttcgcatctgccgaagcctgagttcattgatagcaggatcgtccgtctggccttcgacgccatagttggccgaaatattgttgtcggttccgtccttgctgtcttccccgttctcttcgttgtgcttgtcctgataggacacaaggtcattgagggtgaaaccgtcgtgcgcggtaataaagttgaccgaggcgtaaggtttgcgcccacgatggttgaaaatatcggccgaaccggaaagacgggtagcaaactgggccagctgtccttcgtcgccgcgccaaaattttcgtaccgaatcgcggaagcggtcgttccattccacccatcccggaggaaaaccaccgacctgatagccgcccggtccgcagtcccagggctctgcaatcagcttacactggctcagtatcgggtcctgacggcaggtgtcgaggaacccacagccttcatcgaaaccgtaactttcgcggccaagaatggtggcaaggtcgaagcggaaaccgtcaacctgcatctcggtcgcccaatagcgcagggagtcagtcaccatttgcagcacgcgtggatggctgaggttcagcgtattgccagtgcccgtatcattgatgtagtagcgcctgttttccggcatcagacgataataactggcgttatcgatgcctttaaaagaaagcgttgggccaagctcgttgccctccgccgtgtggttgtaaaccacgtcgaggataacctcgatttcagcggcatgcagggtggctatcatctgcttgaattcgttgatggtgtgcgttgccatatattgaggatgcggcgcaaagaagcttagcgtgttgtagccccaatagttgtgcagccctttttcctgcaaatgacggtcgtcggtgaatgcatgaataggcatcagttcgatcgaagtcacgccgagagatttaatgtaatcgacaatctgtggggtggtcatggccgaaaaggtgccgcgcaggtgctccggcacggcggggtggcgcatagtgtaaccgcgaacgtgcgtctcataaatgatggttttttcccagggaaccgggttcttacgcgagcgcgcccatgaaaacgccggatcgataacccgacacttcggtaaaaagggtgcgctgtcgcggtcatccaaatgcaggtcttttttgtcgctttccatgtcgtaggcaaacagggcatcgtcccattttaaatcgccgacaatctgctttgcataagggtctaacagcagcttggcgggattaaaacggtgtccgtcgtgcggggcataaggcccgtgaacgcggtaaccatagagcatgccgggccgggcatcggggagataaccgtgccagacctcgtcggtatactccggcaattcgatgcggtcatactcttcgccttcttcattaaacagacaaagttctactttagtggcgttcgccgagaacagcgcaaagtttacgccgaggccgtcccaggttgcgcccagaggcactggcagtccctcacggacgcgcgttttatgcccgctgtcgaaatttttaaccaattcaccatcgctgtagggatggatcaggcggacaccctgctcggtaacttcaacatcgacctgcgcctgaggtttgataggagggtaactgaagccgtgggtttaacaactttttgggtggggctttggccatcgttgatagttctccaggagagtaaacaagcaagaaatctgcaaagcgcatagttggagtgtagacgctggttttacaaacgcaccttgaaacagatgttttgggcgaaatcctgtacaagttgaggttgttacaggatagttaatagcctgctaagtctttttttcctgtctatttttgacgcgaagttgctcgcaatcgggtgcacaacaaaatgatttaccgcacctttttgctgacggttattttcgaagggggacattcatgaaaatcgatttattatgtcattttgagatggacgccgggtttccggcccactatgaggccgcaggttttgcgctgcatttcgcactgacgccgaaagaccgtaataatctgccagccgatgtcgcggcaaaaattcgcgcggtattgaccgtgggttcaattggtctcaccgccgagcagatggacgcgatgcccaaactcgagattatctgcgcgcagggcgtgggttttgaacagattgatatagcggctgccagagcgcgtaatattcaggtgacgcacggccccggtaccaataattcagcggttgccgaccacactttggcactgatgctggccatcactcgcaatattcccgacttcgaccatcgcgtgcgcaccgggcagtgggcgcgctcgcgcatcgtaacccccggcatgtttggcaaaaagttgggcatcattggtttgggcaatataggtatgcagattgctcatcgctgcgccggaggattcgatatgccggtagggtatttcaatcgccgtcctgtggcagacagccggtaccaatattttgacagccgtcagtcactggcgcgttgggcagactatctggtcgtggcgacaccgggagggaaagagactctcaatctgattgatgccgaggtgctacgcgaactcgggccacggggatatctcatcaatattgcgcgcggcacggtggttgatacgcgggcggtgatcgagagtctgaataatcacactatcgctggcgcggcgcttgacgtgcttgccggtgagcctgaggtgccggaagagttggtaggcatcaccgggaatctggtgcttacgcctcacgtcgcggggcgttctcccgaggcgatgtcaaacatgatgaaacaggtgctcgagaacttgaacgcccatttcagcggacaaccggtagtcacgccagtatcggcctaatcctcacgcgtttaaggcataaagaaacaacccttattagtaaaaagcataagtaacttttttttcgtatttgtcctattggttacacggacgtaacaatagaggcaagtataactaattaggggttcacggtgaatttccaacagctaaaaattattcgggaatcagcgcgatgcaattacaacctgactgaagtgtcgaacatgcttttcacttcacagtcggggtgagtcgtcatatccgcgaactggaagacgagcttggggttgagatttttattcgtcgcggcaaacggttactgggtttgaccgagccgggcaaagaactgctttccgtcgccgagcgtattctgaatgaagcgcaaaacatccgtcgcctggccgatatcttctctaaagaagatgcgggtgtattgaccatagcgaccacgcacactcaggcgcgttacagtctgccgagggttattaaggcgtttcgttcggtgtatccggccgtgcgtctcgagctgcatcagggctcgccgcaggaagtgctggcgatgttgctcagtggtcaggccgacgtggcgatcgccagtgagaagctcattaacgatccttccgtcgcctcgtttccgtattaccgttggcatcacgccatcctggtgccggatggccacccgttgctggaccagcagccggtgaccttgcagcagctcgccgaatactcgctggtgacctatcgtcaggggattaccggacgttcgagaatagacagcgccttcgagcaacacgggcttaacccggacatcgtgctcagcgcgcaggactccgacgttatcaagacctacgtggagctggggctgggtgtcgggattttggcggataaagccttcgacgccgaccgtgaccggggtctgcaactgattaacgccgagcaccttttcgaagccaacaccgtttggctgggcctcaagcgttctcagttacaacgtaactatgtctggcgatttattgaattgtgtaatcagagtttgtcgatcaatgagattaaagagaaagtctttaaacagccgcagaacgacagtgacgtggtgattgattatcaaatttagggtttgaatttaatttcttaggtcaagggcacgcgcccagcgcgcaaggcgcgtgcctttgacctaaaaagcaggtccagggcagccgcccagcaaacacgccacacactcttgcccaaaaaaagaaacctaaaacaatggccatttaaggccattactgaatgataaaactccgatcaaatgtccctttaacgtcaactcttaccggcaataatcccgcctgctggtaaaaatcggcggtctgctgctgctgcgcaatcgtcttgtcatcgagcgactgccagcgggcgttgctgcgcccataggacagcctggcggcctcaggcgggaagccgatgattttcgacagcgtctgactgtaagtatccagatgctggtgcgcccacacctgtgcctcggcaagtcgctgcacatagtcggcaatggcagcgcgtttttgcttgtcattcagcgcgcggtcggtcgcggcgataaagctgttgcccgaccacaatccgcgtccgtttaccgccaccttaagagagtcctgcgtttcggcaaaggcggtgtaaggttcccacgtcgcccagacgtcaaccgatccctgcaccagcgccagtttggcgtcgctcggctgaaggaatctgaaggtcacatctttggcggtgaggcccgcagaggctaaggcctttagcgcgacaaagtggccaatcgatcccttgttggtggcgatgcttttgcctttcaggtcggcggcgctgtgaataggactgtcggcgcgcacgataagcgccgtgccgtaagcgtctgacttatcgacggcaatcgccttgacttgcgcaccggccgcttcggcaaacaatagcggcgcatcgccaatcacaccaatgtccaccgcctgcgcgttaagcgcctcggcgagcgggcagcggcggggaactcagaccattcaatcttatagggcaaattttgcagcttattagcggcctcaagctgggcgcgcatattgcctttctgatccgcaatacgcagtgtgatttctgccgcgtgagcggtcagcgatgagagtgaaagtgccgccaacagactcagtccagcgagtcgataacctaaagatatcattcgtgttcccattaccattctgcatgcgccgccggaagactttcctttaacgcctgctgtttgtgtgcggcaattttctgtcgcgtgagaggaataagttcgcgcccgtattccacggcgtcattaagcggatcaaagccgcgtatcaggaaagtctcgatgccgaggtcgtagtatttcagcagcgcatccgagacttgttccggcgtaccgaccagcgcggtcgaattcgagctgccgccgaccagcgccgcgataccggtccagagatggttatccagacgatcgcctttcgctaccgcatcgagcagccgttgagctcccacgctctgtggtttggcctgaccgaggttcacgccgttcttttccagctgggccttggcttgggcgcgtatgatttcagccttttgccatgcttcttcctcggtgcgacccaagatagggcggaatgaaatgctgaagcctacctcacggccatagcgctcagcctctgccttgaccgcgttgaccgtttcggacgcgctggcgagcggttcaccccaaagtgcgaacacgtcggcgtgtttcccggccacgcggatagcgtcatcagaggacccaccgaagtaaatcggtaaacgaggctggtggggttttatctgcgtgaaggcattttcagcctgatagaattcgccccggtggttatagcccttatccgaataccaactctttttaatcaccagcaaaaactcttcggtgcgggcgtagcgctgggctttgtcgaggaaatctccgtcgcggcgctgctcggcatcactgcctccgctgatgatgtgcactgccaaacgcccgtcgaggaggttatcaagcgttgccagcttgcgtgcggcaagcgtcggttcaacgaatcctgggcgatgagccagcaggaatttaattctcgaggtactggcgcctgcgtgagcagtcaccagaaaaccatcgggttgatcggacccataggccaccagaactcggtcgaatccggcattttcgtgggcttttgcgaagtcggcaatatattgcttatcaaacactggcccagtgggcgcaatagtctccgaggctaatcgatggccgatcatcccaataaattgaacgctcatggctgatactcccgctgttaataaccctcaccacatcagatggcagacgagatttaccttagacagcctggtccgcgctgagaaatcaaaatttaacatttggttagcgataatatgaattttgcatcctcaggcccggtgctagcctgcatatcattgtctcattccgagccttcgatgcgtggagcacgtcctatgtctgattctctaaattcaattcccttacgccacactgccgaactgactcaggcgctgcgcaatggtcaggaagtggctatcgttgatctgcgtgaagaggccgatttcggcaccggtcatccgctatttgccaccaatctgccgctgtcgaagctggagattgaggtgcttgaccgcataccgcgtcgtagcaccactatcacgctgtatgacaacggacagcgttataacccgcgcaccggaacgcggctggctgaagtcgcgtatcagcgacttaaggcgctgggatatgtcgatgtggcactgttggcgggcgacctcgccggttggaaagaggcgggggtgaggtttttaccgatcttaattcacagagcaaagcctttgccgcgtgggccgaatatcatcatcagccttctgcgccacaagaaagcgcgccggaaatcgctcgtgaatgggcggcacgcactggggctcagcagatcgatttagcgcagtttatccagtggcaggccgatggccaacgcacactttatctgttcgacgtgcgcagccccgaagagtttcaggccggtcatttgccgggtgcgcgtaatgtcccgggagacagactgacgcagtccatcgaccagtttgccagcgtacgtggggcacgcgtggtgcttatcgataacgacggcgtaagggcgaatctcgcggcgtcacgtttggcccagttgaactgggacgccttcgtgctggccgacggcggcaagcctgaggcactgtttaccgaatcaggtaacgggactgtcacctcggcaccggttcctgcgattgaaagtattgatggccagcagctgcaacagtggcttgaggaaggggaaaccgggatagtggacctgacgcttagcgccaattttcgtaaccgtcgcattcccggtgcggtttttaccgcacgcagccagctgccgcagacgttgtcgcagcgtccagcctataaacgctgggtagtgacctgtggcagcggttttctggcgcgttacgccgtcaccgaagtggcggagttgacgggatcaccgacctatttactccacggcggcacgcttaaatggatcgatgaacagcgcccgctggagcacggcgattcgccgtatttgcagaatccacgcgacaaatacctgcgtcagcatgagcaagacgacgccagccctgaggcaatacaggcctatcaggattgggagaaaggtttggtggcgcagctcgaacgtgatgatactcacggctttcgtttgatctaatacggggggagaatccgccaaaaaaaagggcagccgaagctgcccttttttaatgcaaaaatcttgtttagcgacggccgcgaggatgggttctggcagtccagtcataagttgccgaagtgcttggcgtggcattggctttggcacggcgtttttctgctcgcgctttgctggcgactttctctttttcagccattaatgcatcaatataatcgtctttaatgcggttgttttccgaattggtcagatcacgtccctgggcctttctcgccctgtctagctgcgtttttaactcgcgttgctcgctttccgtcatgtcctgctgtgtcagtcttttcattgctttggtatccctttgaggaaagtgatacctagtgtaatcgctaacagtcaaaaatctcagacttaacgcgctttttactcaagattcttgaggtttctgcgtctgtttcaccgctaccccgggaaattgaatcagcggcaggcgggttgactgccaaaaggccaataatgccagtaaggcacagactgccagacctatatcaatcgcgttgaccatggcgctgcgagcgagtggataatacgacacaaactgcgcggccaccggctgcaacagcacctgcgggtcggcaaaatgccgctgaaccgactcgggaagcacagcgttgctgccgtccagcagcttgcctgccacgtgaacgctgtaccacttcgtcacggctgcgccagtcagcgccgtcccaagcaggccgccgaccagacgaagagactgggtcagggcggtggcaatgccgagaaattcacgcggtgccagcgtctgaataaaaatggtcacgttcagcaggatgaaaccaatgccgatcccgccatcatcatcagtcccatcagtacgccgaagtgtccacgactgccgagcaacgccagcagtgcacaggcgctggcggcgaccagaaagcccatctgcggcagacgcatcgggttattcatgcgggtcacaatacgaccattgataatcgcgctgacagtaatgctcacacccatcggtgtgaccagccacgccgcctgcttcggcgaatatccgtatcccccctgaaacagcagcggcataaagtagagcagggtaaacagcaccgcaccgattaatatcgaaatagtaaatagttgcttaaccggaccgatggcgaagagcgccggtggcaggataggcgaatgagcacgtcgttgttgatacaccaacagcgcggcactgagtccgcaggccagcatcaggccaatcagcgagaaggccgaaccgttgctcggtaaaaactccgccaacagctgcatgctgcccagcgcgcacataatcagcagtgcgcccagccagtcgaggcgaatcgcggccttcttgggcggcttgatatagggcagataaatccacgacaccaccagcgccagcgcacccagcggcaggttaagataaaacaccgaacgccaaccgtattgctcagtcaggatcccgccgagcgttggacctagcgcattcacgatgctgaacgccgtactgaaaagaatctgccaacgcaggcgttgtcgagtatcgggaacagttcggggatgcaggcaaaggcggtgccgaccaacataccgcccgcaatgccctgcaccgcgcgccagagaataagcatctgcatggtgcccgcaaaggagcagagcgcagaggagagagtgaacagcagcgtggcggcaatgacgaaatatttgcggccatagtaatcgcccagacggccaaaaatcggcacggtgatgatcgaggtcagcagataactggtggcaacccaggcgtagaggtcgaaattacccaggtcggccacgatatacggcatcgcattgccgataaccgtttgatccagggcggacagcatcagtaccagcgccagtccgaggacggctaataatgaacgacggaaagttaagggtgcggcaacaactgaatcagtcataaaacatgctctgcggcaaaaagagagaaaacgaggtgctgggcagcaggggcctgaatatttcaagccttagcctgcgaagataataggggaggccagagtgaaaggcaaagaggagtttcaaatcacataatcagttttacttataggtctcgacatcagtttgtcgataagctttttcagccctttattcagcggcttgtcctgcctgagaaccagcgccagctgcctttccagcgtcggctggagcggacactgagccagtccgcatcccgctgattcaccgcgcagcgccagctgcgggacaatgctatagcctagcccgttgctcaccatctgttttatcgcctcgatactgcccagctccatgaccggacggggtttcaagccttgtaactgaaaccagttgtcgatcagcaatcgcgtactgctgcctgtttcgaacaagaccagcggcaggccgcatagccgttcgggcgtgagtgaagacaggtccgtgtcgtggcgttgtgggccaatcagcacaaactgctcgcgatacaggggcgttatcgacatattttttcccgcggcgggaagggtaaccaacccgagatccaaacggttctcctcaacggcacgggttatctcgtcggtatttccaatcctgacgctcacctcgagatctggccagtcgaccttaagttgaccgagtaattcaggcagtaaatgaatacaggccgtcgccccggtgcctaacgtgacctgtccgctgactccttgtgcgtggaccgccattgcgcgcagcgcgagctcgacgctgttgtcgagttgcgcgatatgctcaagtaacgtgctgcctgccgaggtcggcttcatgcgcttggcgatgcgttcgagcagtttgaggttgaagtatttttctaactgacggacttgcaggctgaccgcaggctgggtcagtccgagctgctcggctgctgccgaaaaactgccgtggcgaaccaccagttcgaaggtcgcgagctgttcgagattcagtttgggcgaggggtgtcggttcataccaaagtttttcttatgccgatgataagttgacaaagctacattaagttaactgtttactttactcttgaaaacaacgcaatcaatgatatcgagaaaacgctatgttacccgagagttacacagaaaatgcccttgagctgtgcgatgccagcgaagcggatatggtggaagtgcagaagatttatgcacatcacgtgatccacggattgtcgagcttcgagaccgaagcgccgacgctcgaggagatgctgctgcgccgcagaaacgtgctcggcaaaggtttgccctatctggttgcacgccaatttgggcaagtcctaggctactgctatctctcaccctaccggccacgctatgcctaccgatttaccgtagaaggttcggtatatatcgccgaagcgcaccagggtaaaggcgtgggaaaaagcctgatggccgaggcgattttgcgcgccgaacgcggcggctggcgtcagatgatggcggtcatcggtaacagcgaaaatatcgcctcactgaggctccatcagtcgctcggatttcacgtcatcgggcaactgaccggcgtcggtttcaagcatgggcgttgggttaacaccattatgatgcagcgaaccctcggcgagggagagacaaccccaccctttgattgcgaaaaataacgataatcattatcatccatggctttgaagatgaacttcgaggccttatgcgtttctcaagttgggcaatggccatcgctattgcggtaggcagtggtgcagtaatccagacggcgcaggccaaaacggttgtcgatatttaccagcggaaggtcgagatccccgataatccacagcgaatagtgcttggtgagagccgcatgctctacagtctggcgctgattgaagacggtgacccttcggcccacgtggtgggttggccgggtgacatgcagcattatgacccgcagagctggcagctttacgtgaaggcgttcccgcatattgccagcgtcgaacagataggcaacaccagttacgaccagatgagcgcagagaagatcatcgccttaaaaccggacctggttatcctgccgcgctatgccaaacggccgtcgaatgaaggaacgcttgaacagcagctggataaggccaaggtgccgtttatctacgtcgattttcgcgtcgatcaactgcataacaccgttccgagcctgcggctgctcggccaggcattgaatactcaacagaaagctgaacgctttattgatttttatcagcagcatatgcagcatattagccaaacgctggcgaattatcagggtaaaaagcccagggtgatgctgcaactgcatttgggcagaagagagagctgctgtaccacggttgccaacggtaatctcgctgacctgctggcgtttgccggcggcgataatatcgctaaaaaggccttcaagggcgtgtatggtgagatgaatcctgaatcggttattgttgccaatcctgacgtctacctcaccaccggcatgtcgggtcctgaaaagccggacgatttgcagctcggcccgcaggtctcgaaggaacgggcagaaaacagcttcaggtcgttaatgtcaaaccagctaattctgtcgaatctgcgcgcggtgaaagaggggaacgcctacagcctgtggcacaacttctatttaagcccttaccacctcattgacgtggaagtgttcgccaaggtgttttatccgcagctgtttgcctcgctggaccccgatcaaacgctgaaaactctgtaccagcagtttttacctatccctctaacgggaacctactggactcgactccaggccaagccctaaccgccaggctgccggaaccttccggcagccatttctcatgagtaaatcctgatttttttatgattttttctagatgcagagcatcagaaatcgacgctggccgacaacaccacattgcgggtctcgccttcttcaacgcgcaggttaccggcgcttgaggtgtagtattccttattgaagatgttgttaacgttcaaacgcaactgagtgtgtttgccgagcaacgcgttgtcccaggtgatgaaggcatccgccaccgtataggctggcatggtgaaactgttttcaggatcgcccgcccgcgtgccaacatagcgcgcaccgccgccgaggcgaatatcgcccggaaccggcagccagcgcagagtatggctgacgtacaggctccccatgttggtgggcgcattcaccagacggttaccgacgttgttctgcgacacgttgtcctcaactatctcggtcttgtcgtaggcgtagttggcactgacgctccagtctttggctatttctccgttcagctcaagctcgacgccgcttgaacgtgcttttggaatgttgcgcgtgacgccattgatgtataccgacatgtctttttcatcgatgcggtaaagcgcgacagtggcatcaaggcggggagaaatctgccatttactgcctatctcataggtggtacccagttctggctgcgcggtattgccgtcgtcatcgacgtcggttgaaggcgtaaacgacttgctgaagttgccgtagaacgacagggaatcgttgagcatgtacaccaatccaacctgtggcaggaacttgttggcggtatcgttttgcgtctcggccggcgtcacgaagccggaagaacccttttgattgtagtgctgatagcgaccaccgatgaccccaatccagtggtcggtaaagtggatgctgtctttggcgtagacagaatggttgaacagcgtcgatcgcaggttactgttgctgtctgaataggtcgaaccgttggttatcggtgagacgccgtaaaccgggtcatacatattaaagtttgagttgaccttgccgcgataagaatactgcttgtaggtctcgaccttctcatagtctgcgcctatcagcagatcatgcttcatgcctaaaacctctggttcgccaatccagtcccatgaggtcagactggtttgatgattaaagccacggttggcgtctgcacggcgggtcactgcaccggtggtggtattaatggccgtcgcgcgcacttcgttgctatcgtagcgacgttgcatccaggcgtaggtgaagcgggttttccagtctggcgacagttcgtattcccaagtggtattcaggcgcttgtttttgccccatgcgtggttagccaactcgtcgaggcggcgttcgtaagggatgctgagaggtttaccgttgataaacgcggtgccgcgatcgtaaggaatatcgtatttatactcctgatagctgatgttaaagctggctttttcaccgtaccagctcagcgacggggcgagcagggtgtgctggtctttgccgaagttacgccaataatcttccgactggcgttcggcgataaaacgaaaggcgaaaccattgcccagcgggccggtgacgtcgagggtacccgcaccgccgcctgaacctccggtacgaccgctaacgcgggtgttccattcatactgcggtttcttgctgataacgttgatgacgccgccggggttttggatcccgtagagtaaggaggctgagcccttcagcacttctacgtggtcggtggtcgcgtcaaagccgagtccctgattgctgcgcacgccgtcgagcagaatggaaccgtcgctgttggcaccgaaccccctttttacgaaaccgtcttccgtgccgcccaacgtgttgccctgcgtcacgccgctaacgaacttcattgcgtcatcgagcgaggtcacctggtagtcttcaatcattgactgagtcactacgctgacagactgtggtgtttcaatcagaggggtatcggttttggtggccgtagaggcctgcgttgcgccgtattcgaccgggttcgcgtctgctgcgtcggcagtaatggtcatgaccgagccggagttatcggcctcgctgccggtggcggcgagcagggggagcagtgtaagatggccagcgcgaggacgctgggtttgaaataacctgttgcgcgagactgtccagagtgaggattagcgccgttttttatgtttgtttttgataatgacaaaataatggtccctgaaaatgcaaatgataacgctttgcattctaattaccatttttgataatttacactcttttttacattgtcagttacaaaatgtttttccggcttaggcgatagatatccttcgattccaacaccttatcgccctcaccgcgccgagcggcgttgagcatggctcgtccgacgttttctgtggtcaggataacgccggggatgagaggcctgaggacggtaataaatggccaaagaagagggtaaagcaggcgataagcccgggttttcgacttcacgccgtgcaacggctgaatgatgccggggcggaagaggtacaccgccttgaagggcatacccagcaaagcattttcggttttgcctttcacgcgagcccacatggtcttgccacgttcggtgctatcggtacctgcaccgctgacgtatacgaaggtcatcatgggattaaggggcagtaaagcatgggctacagacagcgttaaaccgtacgtaatgtgaacatagttgacttcggacatgccaaaagaggaaacgcccaggcagaagaagcaggcgctgaagttgccgagccgagattcgatatcgctcaggtcaaacagattgctgtgaacaatttcggtcagtttatcggcacttttacccactggcgtgcggcctaacacgacgacttccgtgacgtcttcagccagcagagcttcacgcaataccccctgaccgaccattcctgttgcgccaagaatcaatattcgcatgatgacacctctaaaaatggggggcagggaatcaatgcgccaccgtgccgatggcgcagaggcaggctgttattcgacggtatcgtatttgatataattattcgagcagttgaggtgagcgtcatatttcaacgtgcctgacgggcctcttgccgtaaacggaacgtcataggtgccgttgctttgcttcacgttgtcggcaataaatgacaggctcgggatctgggtacccaagttgtctttgtcgttaccccagttcggcagtttattttgcatgaagtcgcgggttaccgtatccatggcattttgtggcgtgatggttgcacaggcttctggtgatgtacgctgcatccacgttgggtagatataggtcatccccagcgtgaacaccacgaacacaaaaacgatgcaaatcatcgcgcctaagataagtttacccgtctttccaattacaatagctcctgacacgatatctcctgagtcttaccgactgatgttaaaaaaattcatgcgctaagagtacgatattggggcggttttataaaccttagcaaagtttcttaaagggcaaaatgtgctgtggggtgggggctgagcggcccttaatgcgcttttaaggtctaggtctaggtctaggcctaggtcttaaggtcaagggcacgtgcttcacccggcgctgtcccgaatccgccaacaatcttcttaaacaaaaaccggcaaccttgcggtcaaatccacgcacggtctaacggcggggtttttttgtttgttctttgctgcatcaacagcggtaaatctgatgtcctttctgcgccggattcacattggcgggaaacgtgcggcatctcaaatgctcactgtcaaaaatccctcctattctgggcaggcaacgctcaaaggctgaacaaggttttacttaagagtttattggcgggttcaggatggcgctgagcggctctgggccgcaccccagcaaaaaggcgagtttgcaccgcccccaaccgaacttgaagttacaaaacaaatttgaaattaaaaaccctcccccgataattactcttacattccgaaagtcattttcttaaacaaggagcaggatatgagtcagcaacccactgtcgcagtacttggactgggtgccatggggcacgcttttgccgctaacctggtaaaaaaagggtttaccacccgcgtctggaaccgtaccgcatctcgcggcgacgcactggtcaaggccggggctgtcgcaggtaagacgccgcgcgaaaccgttgagggcgtggatgttgtgataactatgctgtcagacggcgaaaccacgctcgcggtgttcaacggcgaagacgggctgctcgcagggctgaagcagggcggaattgtcgtccagatgggaaccctcggcgttgaagcaaccgaacagcttatcgaactcaccaaaaaacagcgcccggatgcggtattcttcgacgcaccggtgtcaggcaccaaagcccccgccgagcaggcgcaaattgtggtgctggccagcggcgacagagaggcaggggccgccgttgaaccggtgtttggcgcaatttctaaaggggttaaatggctgggtgaagccggccgagcctcgaagatgaagctggtggtcaatgcctggcttatctcgatggttgaaggtatcgccgaaagcgctcagctcgccgaggaactgggcttcaccaccgatgacctgtggaacgtgctggacggcggtccgctggccgtgccttacatcaaaggcaaaatggagatgttcaagaccgacgactatacgccgcagatgcaactgacctgggccctgaaggacatcaatctggcgctcaaggccagcggctcgcgcaagctgccagtgatgaaaaacatcagtgaaacctggcagaaagcggtggatgccggttacggtgataacgacctttccgtggtctatcgctaccttggcacccaaaaggctaaataatcctccccggctgccgcagattcactgcggcagccgggtaccgacacgccgctaaattattttcgtcatcattgtttaataaaaacgtcatttaacctcgctagcttatccccgttgttttatttgataaccgttcaccggttgaaactgcgggatgcataaccagatgtctgccatagatattgcccacctgaccaaaacttacgcgtcgcaaaccgtgctggatgacgtatcgttgcacattcgccacggtgagtttgtcgcggttttaggcccgtcgggctgcggtaagacgacgctgctgcgcacgattgccggattcgaacctgtcgacggcggcacgatcacgcttggcaacaataccgtctcttctcccgagcatcacgttgcacctgaacagcgacagctggcgattgtcttccagaactatgcgctttggccgcacatgtcggtcgaagaaaatgtggcctatagcctcaaagttaacggcatccccaccgccgagcgccgtctgcgtaccgcggcggcgctggaacaggtcggactcggggagttcgccagccgacgtcctgccgatctctctgggggccaacgtcaacgggtggcattggctcgctgtctggttgccaaaccctctgtcgtgctgctcgacgaaccgctggccaatcttgacgtacatctgcgtgcgtcaatggaggaggagttcaccaactttcaccgccacacgggcgcgacgctgctgtatatcacccatgaccaacaggaagcgatggcgattgccgatcgcgtggtggtcatgaacgctgggaaagtcatgcagttcgcgacgccgcagaccctttatcttgaaccggctaacgagatggtcgccaaatttatcgacgacgggcgggtcattgaggttgaagatattcgaccggcggagggggaacggccgacgtcaacttgctcggcgtcacttatcgtttgcgcgccagcccacggcagcgtgcacaacgcaatggcaaaatttgcctgcatgccgcttcggtgcgtgcggcgcgagaggatgaaaaaggtttcagtacgacgattaaacgtatcacttatcgcggcggctacagccagctggacgcagagccagacggcgcaccggggcaatggctttcgctgcacctcaccgatgttaagcgtttagacgttggcgatagtctgcgactcacgctgaacgacggctggctgatcccggataacggttcgctgtaatacgctttaactgcaatagttgagtaatgatttttttctgacttcttcttaaaggacagggctatgcacctcgcttttgcaacatcagctaaaaaaatgaccgtcaaaagttcactggcagcgttgctggtttccagcttgctggcgacaatatccggcgctcaggccgaggataagcccagtggtaagctggtcatttacacctctcaggcccccgagattgcccagcagaccattgacgcttttaaggcggcttatccgtctcttcaggtggaatggacccgtaacggcactactcagctgatgaacgtgctgcataccgagatgatggccggtgacgtgaaggccgacgtgctgctcgttgccgattcgataaatctcggtacattaaaaaaagaaggcaagctgatgccttatccgcaggcgccggtaggcaatatcaaggccagcttctacgacaaagataaaacctggttcggaaccaagatcattgccaccgtgattggctacaacactaaaaatgccaagccggtcgactcgtggatggcgctcaccgacgcggtcaataaaggacaggtcgccgtgcccagcccgctgtattcaggcgcggcactttacaacctgcataccgccatcaatacgcccgacataggctggaccttctatcagaagttggcggctaacggcgtcagtcccgaagggggtaacggtccggcgcttaaggccgttgccagcggattggataaatacggcgttattaccgacgccgatatcattctcgcaaaacaaaaggggtcacctatcgatcttgtctatccgaaagagggggtgtcgtttgtgaccgagccggtggcgattctgtcgtccagccacaacgttccggcagccaaagctttcgtgaatttcctgctttcgaaacagggacaagagctggtggtcaagcaaggcaatcgcccgattgacgaaagcgtgcctgcaccggccggttttacgcctatcgacaagattaaactgttaacgctggacgccgataaagcggtcgatgacgataaacaggtgcgcgctaaattcaccgaaatcttcggcggttaaggcgatgggcgttatgagcgcgatgaacgttatgcgggaattacgccgcacagtggccttacggcgaatcttcggctggcgaagcgaaagggcggtattgtggtttttggccttgggcatcggcgtactctccgtggcgccgttaacgcggctgatttgggccgcgattgcgccagacggctcgcctgacctcgcgcacgtattgcagctcattggtacgcaaaaggtatggcaggcaacgttgaatacgctggagattgccgttgccgcaaccttgttggccatgctcgccggtacgctcgcggcgctgctggttgggctgtctgatatgcgcggtaaacagctttgggtcttcacttttattctgccgttgatgattcccccgcaggtgattgcgctggcgtgggttcaggcgctgtcaccttcaagcccgctcttaaccggggttgaggctgtttaccggtcgctcggttggcgattgacgctgggcaacggtcagcctttgtattccctcatcggcatcattatgctgcttggccttcacaacgcgcctttggtttttctgaccgtgcgtgcgggtctgcgccgtttgccggccgatttagtcgaggccgcgaggataaccggcgcttcaccgttgagagtgctgtttacggtcattcttcctctggcacgcccggcgatttttgccggtgcggcgctgtcgtttgtcgctgccgccggtaacttcggtattcaggcgatgctcggcattcctgcacgcgtgcctacgctcataacgctggtgtatcagcggctcaacggctacgggccttctgcgttaccggatatggcggtactgtctttactcatcgcgctgataaccttcggcggtctggcactcagccgctatctgggtgggcgtcgtgatgtgcgagtgtctggttcactgcgtcagctcaaacagccgctcggcgcatggcgtctcccggccgaatggctggcgtggctgtggattggcatgactttgttgctgccgctttccgcgttggttggcacctcgctcactaatggctttgggcaaacccttaaccggcaaacgttgacctttgacaactataccaacgccctgtggcaatatccggcaatccatcaggcgtttttcaccagtcttgggttgacgctaatggccgtggtgctgctgaccctcgcctcactgtttttagcctatttcctcagttggcagcgaagccgactggtgagcctgctgcaaatgtcgaccgaactggcctatgcgctgccgggtattgtcaccggtattgcggctattttgttctttctcaaacctttgccactgattaacgtcagtatttacggtaccgtatggattatcctcgcggcctacctctcaaactttttggcgctggtactacggccaacgcttgcgggttttgcccagatagatcgatcgctagacgaagccgcgcaaatttccggtgcgggatttatgcgccgtatgtgggacatcctgatgccgttggccgcgccctcggcgatggcaggggcaattctggtgtttctcaccgcgctgaacgagattcaggtttccattctactggttacctcaagttcgcagacgctggggccgatggtgatttttctcgatgaaggcggctcctcgacgttagcggctgcggtaggctgtttaatgattctggtggtgttgttgtttatgctcatcgctacgttgtttgcccgccgactgccggagggcgtcttaccctggcgcgcctgaaagcctgtttaaaagggtaaaaagtccttgtgctacagttaagggtagcggtgagtctgcaaggattacccttattcattaaaaaggtcaaaggaggagcgatgactaaagtcgcaattgttggcgcacacggccaaattggacagtttattatcaagcacttacgcgctcaggggcatgaagcgctgggtgttgtgcgtaaagagcagcaaatcgcctctctgcgtaaactcggtgcagacagtgtgcttgtcgatatcgaatctgccagcgccgacgcattggcgagcgccatcaaaggcgtcgatgccgtggtgtttgcggcaggtgctggcccaggctcttcggccgagcgtaaacgcaccgttgattatgccggatcggtgttattggccgaagcggcgcgtaaggctggcatcaagcgttacgtgcagatctccgccatcggtgtcgatgaccccatcaagccgggtaccgaaccggtctggaaagcctatatcgaggccaagcgagacgctgatacctctctgcgtgaaagcgggctggactggaccataattcgtccgggtcccttgaccaataaaccggcaaccggcctggtgacgctgtcagaggatgccggcaggggcgaggttccgcgcgaagacgtggcgctggttgttgtcgccgcgctgggaagttcgtcagccgtgggtaaacagtgggagctttgcagcggtgaaacgcctatccgcgacgcggttggcgagtcgttttctgagcgctgacttctgataaacaaaaaccggcatgagccggtttttgtttatcagctttaccccctcctcaggggggaggattggtaaattctgatgggtgatccatactcacaatgttgcttaaaatttaaaaatccctaatatttttttaatccattaagtgaaacaactccttcacaataatgagttaatcatttaagcatcatggaaggattttttaccgccgcacagccgaatcgccgccaacagacagagcgaatagccaaataactcagtgccttcttccaccagattcttgaccagccgcacgttatcgcctgcgatcgcggcctgccagatgtagtgcaggcccatcaggcgtgagaacaccagaatcaccaccaggccgaacagcagtacgggaaacgcatcatcggcgaccagcgcattcaggccttgcagcgtggttttaggcgtgaacgcagcccagcaaagggaatacagggcgagcaggctggcgaaatagacccaggccccaaaatgaatgagatcaaagagggcgtcgagctcgcgaataagcatgcacccgaaaaatcctgccgccagaataaagccgccgcgcagcgttttttgtcgacgtgaatggataaaaaacagcgccgctgtcgcgaacaggaacaactcttgaatgatttcggtggcggaaatttctttgacctgatcctttagaataacaacgtcaaagaacagtacgcctgcggagaaggcagcacaaattgccaaggtgacaaatacaattgcctgcttaattattggatttttcatggagttgagtccgtaagtaaattttgcgggcatagtacggacctaaagtaattaatactgatcaatcagtgcgacttaactaactgagttgctggagaactgcccaatcgcttgcacaaaagacagggctgcacatagaatcgtctactgcagtatgtttgatacattgaggaagcaatgagcaataacacaactacggctaaacaacaggaagtaaagcgcatcgtagatgtcctttcaaaagcgattgctcagcatcgtttgcgcccgggtgctcgtcttatcgaggcgcaaattgttgaagcgttaaacgccaaccgcaatcacgttcaggtggctttgcagcgtcttgccatgcagcgcattgtgaccattgagccgaaccgtggcgcgatggtggcacagcctacggcaaaagaggcgcgtgagattttcatcgctcgtcgcgctatcgaacgcgctattgtcgaggtgattaccccggaaatgatgcgccgtcaccgtcaccgcgtgacgactcatctgtgtaaagaacgtgaggccaccaactcaaccgaccgtcgcgctattgtgcgcgaactcagcgaatttcatctggtgctcggtgaaatctgtggtaatgaagtgttgagcgaagtattagctaatctgatggttcgtagttcattaatcgttgcactgtatcagcgtaacgacgtgccttcctgccagtccgatgagcatcaggcgattgtcgatgcgctagaagcgggggaaaacgcgcgggcggttacggtaatgattgaacatctgcacgaccttgaagcgcaactggagctggaagaacagtcgggcaatgaggtgaacctgcgtcaggcgctggccgacctctgacaacgggttgtttttgccgccgctgaagcaaatcccctcccgtgaggggtttttattatcgtcctaaccccctcatcgggaggggtgattgtttcagccaatgattacatcttaaagtcgggaataaagcgcgtaacgtcaacctcgaggaactgcgaacgctggaagttgtgtttgagcgcatagggcacggtgcagtcataaatcgtcttacaggtaataccgtgatcggcaatgcttgggctgaaggccggatcctgtgagggatcgagcggatggcagcgcacaccggggataaagatggtgtccacatcaccctgataacgagtcgtcattgcccacatcacgtcggacaggtcgaagatgtctacatcgtcatccaccaggaacacgtgtttcagctcggagaaggcggagaatgccagcagcgcagcctgacgatggcggccttcgtcctgcgggccacgttttcctacctggagcacggcaacgtatttaccggtgcccggtgacgggcagtgtacgtttttaaccagtcctggcatcgcacgctcaaccatgtccagaatactggcttcggtaggaatacctgccagattggtgtgctcatcgctcggtccgatgcaggtttgcaggatagggtgtttgcgatgggtaatcgctttcaccttaataaccggtaccgccgctttggcttcgccggtatagccggggaattcaggcatcgctttgccggtatgcgtgtgctggtcttcctgaacgcgatagttcggtaccagttcaccctcgataactatctctgcgttggcgatacctaatgcgtcgaccgccacgcctttcaccagttcaacggcgcgaccacgcagacccccggcaatcgccagttcgtcataacccagcggcgttgtcggtggctcgaagcaggcaccaatctcgatagccggatcgacgccaatactgatggtgatcggcagcgccttaccggcttcttcggccttgattctgaactggtcgaggtgacggcccggcacgaagtacatcgaaatttcatctttgccctgcacgcacaggcggtgaatggttacgtcgtgctcaccggtttccgggtctgccgcatagcacatccccatggtgaagtacggacccgcatcttcaggggtgttggtgggcgccgggagcagggtgcgcagatcaaagcctggatccgtggccaggtgcaccacttcctgacaaggaacgttgtcattggagataacgaccggtggaatcgcatgtttaaccgagttgcgcagcagatggcccaggtcttcctttggtgcaccgagcaggcgtgccacacgctggcgagaggccagcagaccaatcagaacgcgaacgtcgtcgtaacctttaaccttattaaaaaccatcgccggaccggtgcgggtcggacgcataacggtacccccggcacccacgtaacgataaaccccggaaagctctgcggcgggtcaacgggctcgttggtttcgatgtactcgtcgtcgtaggttttcaacaattcgatggccgaacgcaggtcgtaaacttctacgcctggtggggtagtctttttctctgacataggtttgactccagttccgtgaaatagggatatctatttattcgaatgggttaaaacactctcggataaaatctattcttcaattatgctttcgcgataataaaaatctaatcaataatctggcattattaataacgaaaccttatcaccgagggggggcatggaccttcgaaaactcaaatcgtttacggtgctcgcggagacgctgcactttgccagagccgcagcggaagtgaacctgacacagcctgctttaagcaaccatatcaaggcattggaaaaagatttaggcatccgactgttcgagagaaaccagcgcagcgtcagcctgacgatggaaggaaaggtgcttcttggcgatgtccagcatgcggtaaatcagcttgaactgctggagaagaccgccaaacgtttggcggccggttacaaaggggtgttaaggctgggatatgtggggacgtccgtgctcgacccaacggtgatgaacattatccgcgagtttcgccgccgctgtgccgatatcgatattattcccgttgaaagtgacgttaatcgccagctgctgcttctccagcagggtcaactagacctggctttagtgcgaaaaccgctgccggtttttcgggatctggcgctgctggacctggtcaaaaacaaactttacgtcgtgttgcctgcgcatcatccgttggcgagcaaaaagcgtatcagcgtggaggatttggccaacgagccgcttattttgcaagacgacccgatgggcgtgggctgggtggcgcggtgtataatatcttccagcgcaagggacttttgccgcacaatacgcacctgaccaaggaagtcaacgtggctattgcactggtggcaatgggatgggtattgcggtggttcccgactcacagcgttccctgttgatacaagacgtcgtttatcgggaaatcgatgacgctcaggcagtgacgcagctttcactatgctggcacaaaaaaattaagaaccagagcgtaaagctgtttgttaagcacgtcgaggccggattgggcgccgaataagcgttcccagaggcgggctggcgcttagtgtcctgccgttttggacagcagattaatcatgagcacgcctgcgacaatcattaccatgcctccaatggcataagcatccagtttttggccaaagaagataaagtcggcgcaggcgaccagcacaatgcccattccggcccaaatagcataggcaatacccaccggcatcgacttcagtaccagcgacagcaggatgaacgaaataatatagccgactaccaccgcgacggaggggtataagcgagtgaatccttcagaggcttttaacgagctggtggcgatcacttcagagataatggcgataaaaagataaatataggtcatagcgtcgacccctggcagcggtgttttgtgcagggagttctccagtaaaatttcatcataaaagaacaggatagcattccttaaggtgaaatgacggcatctgcatcaagactgtggccaaaagccgggatattaccgcctcatcaaggcaggcagcgcccgtttacgttttcagcgccaagtggccttagcgcgctgcgtcgttaccaaacccctattccgccgtcacgccgccgtccattaggaaatcgctactgcttatgagggcagctcataaaccctatggatttaaacctgattattcatcgattaaatgtcgataaaatgcatctccttatcaatagcgagaagacgcgtaatgaccccctctccgatgaaaatacaccgtcatactgtgaaaacctctggactggcatttgtttttatcctcagcgcattaatggctttcacctcgttatccaccgatatttacctgcctgctatgcctctgatggccaaagacttacagggcgatgttgaattaaccatcactggttttttaatcggtttctgtattgcccagcttatctggggacccatcagcgatcattttggtcgtcgtaaaccgctctttgtcggaatagcgctgtttattatcggctctgcgggctgtgcactttctaaagacatttcacagattgtgttttggcgcgtttttcaggcgttaggtgcctgtaccggccctatgctgggagggccatgatccgcgacctgtttagccgaactcgggcggcgcagatgctctctacattgatggtaatcatggctatcgcgcctatcgttggaccgctattgggtgggcaaatgattgaaatgagctcgtggcgtgcaattttttggctgctggtcgtcattggcgcactcatgttcatggcgttaaacggcttaccggaaaccttgcccgaagagaaacgggtcaaggcctccttttgtggggccgttcataattactacgccttactgacaaatagccgatacatgcgttttaccttatgtctcagcgcctattatgccgccgcctacgcctttatcaccgattcaccttttgtctatatctcatttttcggcgtaaagccgcagtattacggctggctttttgcgctcaatattgtcggactgatggcaatgagtatgattaaccgtcggctggtacaacgtcactcacttgagtggctgcttaagtgcgcagtttctggggccgccatcgccgcgctggtgctggcttttggggtaaaactccaggtaggcggcatttttcttattgcggccgctgttctggtgtttttctctatgaacggcgtgatagcggcgacgtcagccgcggccgcgctcgacgcggtgcctaatattgcaggatctgcgtcggcattaatgggcgccttgcagtacggcagtgggatcgtctcatcattattgctcgcgctgatgcacgatggcacgccctggacgatggcctggataatagccctgtttaccgtcatcagcgcggttattgcgttaaccaccaaaactgacgtgggcgatgattaacctcaagggattatttattcattccttgtcagatattttttgctgaaaagcaattaaccaaggcgctgccaaaatggcgcgtgcggccaccggcgtcaatttaattgaggccttcaaatcgcacctcgaagaaactcaaggtcagaaaggttggctcaatcctgcctgtcggcgaggatgccgagaacaatcagttttgcggactcgatatgtctcaccgtggcttcacgcgccagcgccgggtcgccgtttttgcaggcctgcaaaatggcattatgttcgtgttgaaacgcaggggtatcttctaaaagccgaagttgcaggcgttcgtacctttctatctgcgcgcataattctgctatgagccgcagttgtctggcattgcggcatccgcgataaagaatttgatgaaactcgcggttcagctcgccctgttttgtggcgtggtggctttctcaagcagcctgtgagtcaattccgctctcgccagcgcttcggcgtccatattggcgacactctgataaatcgcgtcgccctcgaccaagactctcaggctataaatctcgtttacgtcctcggcagtgagggttttgaccaccgcaccacgattgcgctgagtctcgacaatgccctcgcggaccagttgttgaatcgcctcgcgcaggggattcggctcacatcaaattgtgaggcaaggtcgcgttcgaccagtcttgcgccttctgccagttcaccgctgttgatcatctttcgaagagaggcggctaccaggtctgccgttgagtcgagttttgtctgcattaataaatgctcctaaattttggaataatggtataccattttgaagtggccgacaatcagactcgattgacgcgtctctaaggcactccaaaaattccgttaattttcgtaaaggagcaggaaacatggcacgtcgtgaacatcactatcaggtttcggttaaatggacgggtaacaagggaaagggcacggcatcgtataaggcctacgaccgcgattatgttattcaggcgtcctcaaaacccgagattgcaggttcctcagacccggcatttttaggcgatgccaaaaaatggaatccagaagacttgctggtggcatcggtctcagcctgccataaactttggtatttacacctgtgtgccgaagcgggaattgtggtacaaacctatcttgaccaggcagaaggcaccatggtcgaagataaaaccggccgttttgaatccattgttctcaaaccgcaaattacagtggccgccggtaacaatattgagctggcgctgtccctgcaccatacagctcacgaattatgctatatcgccaattcgctcaacttcccggtacgctgtgagccacaaatcacgcataaaaatgaatgagtttgcattaagggacgcgtctttaggttaaataaattttactcctctgaggctaacactatgacgacgacgtccaccgccagtcttcaatctttttcattcgtgctggctgttccagacttgaagaccagcgtggcctactttcgggatgcgttgggattttctctggcatggcctgaaggcggcggatggcagcaggttcagcgcggcggtgtgcgcatcatgctgggccattgcccggaggctatcaggccctctgcaaccggcgatcacagttattttggctacctgaacgtcgacgacgttgacgcgctttatgatgaatttaccgccaacggggccattattctccagcccccgacggacaggccgcacggcatgcgtgaattcaccgtcgcgacgcccgatggccatcgaatgatgattgggcaggaagtgtattgatcgcgttattgaaggatttcggcatagagtcaaaatagaatagagtgtcagaaactccgtcactgataaggactcattagatgaccattcgctttccaaagaaactttgccctgatgatgtcattgctatcacagcaccttcaatgggggtaccggcgtcactgcatacccgtctcgatctggctattgatgtgctaaaaagcagaaagtatcgggtacttgaaggtcaatgtttgcgggcggtccataaaaataaaagcgcggtacggacgttgcgtgccgcggaattgagtgattttcttctaaatgcggaaataaacgccgtgatgccgccgtggggcggtgagctggcgatggagctgctcgaattaatcgattttgaggggctggcgcaggttaaacctaaatggttttctggattttctgaccttagcacgctgcatttcccactgacccttatttgtgggtgggcgaccctgcacggcccaaatctaatggagctaggctccaaagagcgggatgtcaccacggaagccatctggttgattttggagggggagcgcggtgaggtcgttgagcagttttcctctccggcttatcaaaccgaggggagtgactggcgtgaacagccggacgccggatttaacctgacccataaaaccgagtggaagcgcctcgatggcagcacgttgccgatggagtttaaggggcgtttaatcggtggctgcatcgaaaccatttctcgactggcgggcactcgatttggtgatgtgccaaaattttgcgagcagcataagcaggacggcgtcatcctctattttgaaaatgcagagatggcaccgtgcgaattaacccgcacgctgttgagtctgaaaatgcacggctggtttgacggcgttgcaggcgtgttgtttggcagaagcgcggcaccggcggtgaccgaccctactttgcagaactatcatgatgcgctggaatcggcgctcggcgatttatcgattccggtgctctacgatgttgatatcggccacgttccgccgcagctttcgctggtcaacgggccatggccaaggtcagatactttgacaaaggcggcatggttgcacagcttttagaataagcgcatgccgtggctccgcgttatttttcctgatgcagcgactgcataacgcgggagtgggcatcggcgtcgaggcaggtaaactctggcaacatgcttgccgccgcctgcttcaatgcctcaaccaacgcgagtacgcttgggcgcggcggttttgactgaggcatcgtgacgccgaaatagtaggggatttccacgtccagctctctaatcaccactccggcaagcggcaaaccgtaggccgtaaccggttccattatcgctactcctaatccagcacgaatacaggccagaatattgaccgacgagttggtctcaatcacccccgctggcttaaccttggccttacgcaaaacctgttcatagcgccgacgaaggcgatacgggttatagggtgtaatcagcttacgcgacgtcaaatcacccagtgataccaggctcttttgcgccagcggatcgtcttctttgagcgctaatacgcagcgcgattgaccaatccattgaacctgaacccctgatgctctagcggcaggctacttatccctaattcggccttgccggtaataatggcgtgcgccgtttgctcggcggagtcgctgagaatttgcaccgaatcgtcgagatttacccgcgcgagcgccgccggtagcagtcccgaggacatcgagggcgtagcggctatcagcagcggcgttttttcttctttccagatttcattggcccgcagacgaatttgttgcagcgacatgagcgctgtctcgacgtattcgtgcagtcgtaacgcctgctccgtggatgaatgcgcggcccgttgcgtaaaaaaagtggataaccgatggcggtttccaaatcttgaatcagtcgggtgacggcgggttgcgaacgctgcaacaccttggcggctgccgtcacgctgccggatgagataaccgcagagaaggcctccagctggcgtaaatccagatcgttgagtgaggtcattttcggcatccttcaatccttatttttattagcgccaattttaattgcttttttggaataagctaattattaattagtattaagaatacgcatacaaactgaatcataatgcgtttttagcataattgattataagtatttcttctctcttcgccaacaaccaggggttttgaatatgtccgcacaggttgataacagatccggattagaggcgctggaaaagcgtctggcggaagacctgtctttgctggagctgccggccaaatcctgggtgcccgagcggacctacgagggcgctgccgttcgcgacgtggtggtgatcggtgcgggaatgtgcggactagccgccacggccaggctggtgctggcgggattaataacgtcgttgcctatgacgccgcccccgcagggcttgaaggcccatgggtgacgtttgcgcgtatggaaacgctgcgatcgccgaaaagcctgcacggcccggcactcggactgccacaactcacgttccgcgcgtggtttaccgcccagtggggcgcggaggcctgggaatcgctcgacaaaattcccaaaaatcagtggatggagtatctggtctggtatcgccaggtgctggatttaccggtgcgcaacaacgtacgcatgaccggtatccgtaccgcaggctctctgattgcgctcgatcttgaaggtgctgaaacaggacgcgtctatacgcggcgtctggtgctcgccaccggtcgctctggactgggcggtttcgccgttcccgatttcctgaaagaagttgaccgtcagtattgggcgcactccgccgacgaggttgatttctcctcgctggcggggaaacgcgtggcggttatcggtgcgggcgcgtcgtcgatggacaacgctgccacggcgctcgaaaccggcgcggcctcggttgacctgcttatccgcagaaaagagatgccgcgcattaacaagatgaccggcattggcagtcagggcgtggtgcacggcatgtatcagctgccggatgcctggaaatggaagtttgtcgactataccgcctccacgcagaccccgccgccgcgcggctcgacgctgcgcgtttctcggcacgccaacgcgcgtttcctgctcgattgcggcattgttgcggtgaaagaacagggcggagaactgctgattgaaactacgcagggcctgctgcgctacgacttcctgattgcagcaaccggcttcaccaatgactttgacggtcgtccggagtttgcggcaatcgctccctttattcgcagctggtccgacggccgctataccccggaaatgggcgcagcgcgtgagggaatgctcgcgtcgccagaccttggaccggcgtttgagtttcgtgagcgagagcccggcacctgtccgatactggcgcacatacactgtttcaacgatgccgcgatgctgacgcacggcaaggtttcaggcgatatcccggcggtcagcgccggagccgatcgtctggtgcgtggcatcactgcctcgctgtttgccgaagacgtcgacagccatttcgccaatctggttgcctacagcacgccagaattgcagggcgatgaatgggtggattcaacccctttactcaataaggataacgcactgtgatcgatgcagtagaccaggccgccggtctttcaccggacgacacacttttcagcgctagaaggtttcgcccagaatttgtcgagggcgcggagctatgccgcctgtcggtacttcaaccggacaataatcaggggctggatgctgatttacgccttgccctggcgctgcgcatcgcggcgctgaacgccgatagcgcgttggtcgaacaatatcgcgcacagcttgatgccctgacgccagcgcctgaactgctggcgttagcggcaggggaaacgccgcacgccgagccgctggcaacactcgcccgccatgccgacaagattacgctcaccccgagcgaggcagtggagagtgatatcacgcgcctgaccgcggtcggactgagcacgccgcagattgtcgcgctttctgagctgatcgccttcgttaatttccagtccaaggttgctaccggtctacgtctgatgaggtccgcatgatcccttccgttagcctgaaacccctgacctggcatccctatcttcctcctttggaagtggcagaggcctcgccggcacagttagcggcgatgcaggtgacgccgtcgaacaaaaagatctctgaatacgtgcgcacgctggcacacgatcccgagagctatgttgcgcgcaccgtgctgtttaacgccattatgtacgttgaaggcggccttgcgcatcaggacagagagctgggcgcgttgggcgcatcgatagtcaacggctgcaagttctgcgcggtggttcacgcgcgtcgccacgccaatttggccaagagcgatgacgtggtgagcgcgctctattttgaccagcctgcgctcctcggtgagcgcgatgcggctatttatcgctttgcccgtcgactttcggcggtgccgtcagaggcgacgccggaagacgttgcggcactgcgcgccgtagggttggacgagcacgagattattgacctgatccacgctatctcaatctttggctgggcaaaccgcctgatgcacgttctggggcatgccgacagcggcaaatgatgcgctacgacgtcaacgcactcgaaaggaactaatcctcaatgcttgaacttgaaaatataaagctttcctatggcagctcgcagattcttaacggcgtaaacctttcggtaaaacgcggtgacgtggtgtcaattatcggcccgagcggaaccggcaaaactacgctgttgcgctgcatcaattatctggctaagccttcctccggcagcatcgcctttgacgatattcgcatgagttatcagtcggtagacaagcgcgcagtgcaggcgattcgcttgcgtaccgccatggtgttccagcagtttaacgtcttcaagaatatgacggtgattcagaatgtgatggatcccttggtcgtggtgcagcgcaaatcggcggacgaagcgcgcaaaattgccctggaagagctggaacgcgtcgggctgtcggccaaaattgaccactatccgtcacagctttccggcggacagctccagcgcaccggcatcgcccgcgcgctggcggtacgaccggacgttatcctgtttgacgaacccacgtcgtcgctcgacccagagctggtgggcgaggtgctcaaggtgattaaggacgtgacctcgtccgggataacttcactgctcgtgactcacgagatgcagttcgccaaaagcgtctcgaatcgtatcgtctttatggataaaggcgtcgtggccgcagaaggcagcccgagcgaaattttcgataatccatcgaatccacggctcgcacagtttctccgttctgaacactcattctcataataaaaggataacaatagatgcctgcaatcaaatcaagcctttaccgtcgtatgagcctctccgtgctgggcggattagcgcttgctgtgtccaccgtcagccacgccgatacggcggtcagaacgattaaagtcgccacggcggccgaatcgaaaccgctttcctggggcgctatcggcgtcgaaccgcagggctatgagcccgacctgctgcgagccattaatgccaaactgccgcagtacaagtttgttatggaaggcgccgcagaaattgctcaggagaccggactcgcgaccggtaaatatgacatggcgaccagcggcttttatatggcaccggcgcgcaacaagcagtttctgatcccatccaatccggaagggcgagcctgatgaaaatttacagccgtaaagacagcaatatcaacgacatgaaagacctggtcggcaagaacattgtgccggtgaccgcaggcggtggcgttttcaagtttgttaaccaatggcagcaggaaaatccgggttataagctgaatatcagcgcctccagcgccggtgttccgtatccggatcgcctgaaagaggtgcagggcggcaaatatgacgcgctggtgttgccgtcaaatctgggtgagcagaccgttatcgataacctgaaactcgatattaaaaccagcgaaccggttgccatcaataacacctacatccttatacaccgctctgacgagaacaaagcgctggcggatgacgtgaataaggcgctcaaagaactgagagatgacggcacgatgagcaagctgtcgcagaaatggttcggcgaagacgttgttaaatacatcaagtaaggcgcacgcccgcaacgagggttctgacgtcaggggtcaaggctgaaactggatttaggagtgtttaaacgtggatctttccaccatgattcccgagctactctcggctctgccgctgacgttagcgattatgtttgtcgcgctggccgccggctttttgctggcgttgctggccacgaccctgcgggtacgtcgggtgtggggtctgagcccattggctgacctctacgtttcatacgcccgcagcgtgccggtggttctacagcttttcgtggcattttacggactgccaatgctgctcggcctgttcggtatcaaggttgatatttctccgaccctggcctcaatggttgggcttagcctgtatcacggcggttatttgtctgaggtgatgcgaccggcgtacctggcggttgagcgggtcagcatgacgcggctgacagtatgggctataccctgcggcagaaaatcgtgcgcatcgccggtccgcaggcgctgcacatcgggttacccggctacggcaacgccgtcatctatctgattcataacgtggcattggtaatgtatatcggtgctgacgacgtgatggcgaccgcgcacctgatcatggaacgctcctataaccagtatcagtttggcacttatctggtgttgggcgttatctactcgctgctgtgcctgattgcctggcttatcgtgcgtttctttgagctgcgtttctcaaagtacacctcgaaaacggcaccgaccaagatcaagctcagcgcgagcatctgacagagaaaaggtgattaactatgtttgatatcgacgttctgatcccggacttctggagcattctggacgctgtacccgctacgctcgcgatggcgttcaccatttttattttttcgacgctggtgggcggtctttttgcactggttgaataccgtcgtattccggtattgcgcgagctggtggtggcgtacaaggttgccttcaaaggcatcccgatggtggtgatgatttttctcgcctactacgggctgccgacggcgctggcctttaccgcgtcgctgttcggaataaaattcaatcccaacaccttgccaaactgggcgattattattgtggcgctcaccgcctgcgtggcggcgtttcaggccgaggtggtgaagggggcgttgaactcctttgattcgggtcagtctgacgccgccaactcgctgggttacagcagcggccaactgtttcgccgggtgctgtttccgcaggtgatcattgccgctatcccggatttggcgaactcttttatggttatcatgaaggcgttgtcgctggcgtttgcgatagaagtggtggacatttttgctcaggctcaactgacggcggcgctgaacttctattacctcgaagcgttcctgattgccgtggtgttctatatggtgattgcttatgtagtgacaaaaattgccgataagcttgaggcgatgctgcggatcagaacctgagggaaagggcggaaaagtcatcactgcgcgtctgccttccgttaacgagaggcagacgcgtaattttctagccgtcgagtttgacgttaaacctgccggcctgatagtccagaatggcctcgttgatttcctgcgcggtgttcatcacgaacggcccgtgcgaaacaattggttcgcggattttgtcggcgtgaccaaacagtaataccgcgtcttcaatcgcttcaatcgttacgctgtcgtcggaatcatccagctcaatcaaatgccagctttgagcctgctggtcaccgatttgcagtcgacctttcacggtatataaaaacacctcgcgcgcggccggagccttcagggtgaccttgctgcccgccgcgagttgcaccgtcatcatagtgacgccggtcagcgttttaatcggccccgttacgcccgccacttcccccgaaataagactcaccgagccttctccatggcttagcgggatctgcggaatgtcggccgcctgcaacccaacgtagcttggcgcggtcattttcagccgtgaaggcagattgacccacagttgcagaatctccagttcgccgccctgacgcttgaaagattctggtgaaagctcggagtgaatcagacccgaccctgcggtcatccactgcacgccgcccggaccaatgatgctctcatggccgccggtatccttgtgcgccagctcgccgcgcagaataaaggtcacggtttcgaagccccggtgcgggtgcgggccaaaggggagacccagattatccgggcatagacctgaggaccgtgatggttcagaaacaggaaggggtcaaggtgctcaagttcggggccaggaaccggtctgcgggtttgtaaatcacggatgtcatcgcgaaaggccttgtactgacgttttatgcggcgggtcatatgttgctccaatacctgcgggggttaatcctaaatatagcgaatatgcaccatcgcggtgcgaaatcgttttatagcgctttgattaaacgattatggcgggttcttaaggttaattcacccccggttaatccattggtattgcttatgacctgtagatgttcaagtttacaaagcttatggcctgaatcttgctttattgaaatcagtactcagaaaaatcgaggtcggtcatgaatctcagacgtttaaagtattacgtaaaaatcgtggatatcggcagcctgacgcaggccgccgaggtgctgcacattgctcaaccggcactgagccagcagctggcggcgctggagggagagcttgatcagcagttgctcatccgcactaagcgcggcgtcacgccgaccgaagcaggtaaaattctttatagccatgcgcaaaccattctgcgccagtgtgagcaggcgcaaagcgcggtagacaacgccggtagctcgctcggcggccaggtttccgtcggtctcgcgccctctaccgccgcgtcgctgctggcgatgccactgattcaggccgtcaaggctcagcatcctggcatcgtgctgtatctcaacgagaattttggttcgccgatgagcgagcaaattatgaacgggcgcatggacatggcggttatctacggcgataggccggtacacggactgtcattcatcccgcttatgaaagaggacctgtttttggtcggttcggcgcgagtcccgacgccggagccgaccatcgaacttgtcgatgtcgttaaacgtgacctctttatgccgcgtccttataacgtggtgcgcagactggttgacgaaacgctgcaacgcgagaagctgaaggcgaatatcatcgccgaaatcgaatcgccgtcgactctcaacgctgcggtgctcaatgggctgggtgtcaccattctgcctgagtctgccgcgcgggcgatggccgcccagccgggagtctggctgtcgcgcatcgcgtcgccgggcattcaggcaccgctgtcgttctgtatgtcggaccacctttccctgtcgcctccggcgcaggcggtaaaagacattttgctgtcgttgatggtgaagcgaacgcaggataaccggccactgatgctggttcactgagtgccgattcattaataagagacgcttattacctcacagggaaaccctctttcaggctgagaaaacgacaggatacagtggccgttactatcagatgagtagacttgagggttgacccaatgcgttcacagcaggatgaaattgtagattttacggccgcagaagcggtacttcgtatcgaaagaacctcgttgcgcgttcagcagcccgccacgacgccagaaatggtttctttggccgtggggagccggactttgctaccccgccgcgcatcatcaaggctgccgccgacgcattggccaacgggttgacccactattcgccgcagctaggggaaaaaccgctgctgttggcgctggcaaaattagtctctgcccagtcgggcactgaagtcggccccggtgaaattctggtcacccacggcggcaccggtggcctgtctgcggctatcctgtcgatagttaatcccggtgaccgggtggtcattcccgaccctacctattccctttatgccgacctggtcaacatggccggcggcgtctgcgtgcctgtaccttgcaaggagaacctgcattgggacctcgcggcgctggagcaggcaatgcagggcgcgcggctgttcgtgttctgcaacccgagcaacccgaccggcatcgttcacacccgcgaagagattgaggcgctgggcgagattgtgaaagccagcgatacgctggtggttgccgatgaagcctacagcgatttggtgtttaccgaccagccattcacctctgcgctggaggttgaaagcttccgtggccgcacgctgtattgccaaaccttctccaaagctatgccatgaccggctggcgcatcggctatctggcgggaccggccaggatgatcgccgccgctgcgcgcgtacacaactcggtgaacagctcagtcaataccgccgtacagtacgcggcgctgaccgctatcgaagagtgcgctcaggacgtgcgcgagatgcataaagtctacgccgaacgtcgtgaactgatgattgccggtctgaatgccattcccggcctgactctcagcaatcccgaaggggctttctactgtttcccatcctattcagcgcctgtctcgtctgtggagatggtcggtatcctacgcggtttcggtattgcggtgcgtccgggcagcgagtttggtgcagccggtgagtcgcatatccgcctgtcttacgccgccagcaaagagctgatcgccgaaggcctcgaacgactgaagcgaggactggcttcactgtcctgataacggcacggagcggaaaacccatgatgtctatagaaacctcaaaagaaccggtcatgagcgcattgggcagtcgcgcgatgctgttcgaggcgcccggtgcgctggggctcgaaaaccagcagcgtatctgggcgctgtcgaatcaggtgcagcagtggtcgctggtcgcagaggcggtgccgggaatgaacaacctgatgctcacctttcaccagccgccgcaggcgcttgagccgttttacgacgcgctgctcgccgagtggcagcgcggtgagacccagactttgcaggggcgcgtggttgagctaccggtgtattacggcggtgagtacggcccgcatctgtgcgacgttgcccagcacaccgggctgagtattgccgagatagtgcggcgtcacgccgagccgctgtacccggtttatgcgctcggcagccatcccggctactgctatctggtgggatggacccgtcgattgccacaccgcgccgccaaacgccggtgttgagtattccgggcggtgcggtgtcgattggcggcgtacagaccggtgtttctgcttctgccgggccgagcggctggaacacgattggccacaccgaatttgtcttttttgatgcgaccgccactccgccggtgacgcttcgccccggcgacagcgtgcaatttcgcatacagaaggtgctgtcatgattgaaattgaaaaaacgaccgcactgaccagcgttcaggatctggggcgcgaaggttgtctcaactacggcgtagggcgtgcgggggcgatggactctctggcgctccagctcggcaatctgctgttaggcaatgcgccgggagcggcggcgattgagatcccgctgtttccttttcgggtgcgctttcttgaagattgtgcctttgcggtgagcggcaacgacggcgatgttctgctcgacgatcgcctgctgccgccctggtgggtggcgcaggccaaggccggacaaactctgaccgtcaaggcgtcgcgctattgcgcacgtgcgtatctgcatctgccgggcgggattgacgtgcccgaagtgctgggttcgcgcagcacacagttgcgcggtgaatttggcggctttcacggtcgtggactgcataagggcgatcgtctggcggcggctgagccgcagcgcagggtgaaaaccgacctcggcattgcctcgccgtggctgcgttttgccgacctaaacgccgaggttcaaccggtacgcgtgttggccgccggtgagcattttgcttataccgccgagtctcgcgcacgtttctggcagcaggactggcgcatcacgccgcagagcaaccgttacggttaccgtctggagggcgaacctttggtggcgctcgaaacaatggaaatgcgttcgcacggcattgtgcccggcgtgattcaggtgccgcacaacggccagccaatcattcagatgagtgatgcacagcccagcggtggctatccgaagttcgccaccgtgattgaggctgacctttggctgctggggcaaattccgccgggtcgccgtatccgctttgtggagtgtaattttgcgcaggcgcgcgatgcgtggcagacacagcaggactacatccagcaggtgcggaaacaaattaaacagcttaaccgggcttaatcagggtgaacgatgatagcgattaacgagatacgccagatagcgcaaaaaatgcaggcgtctggccttgggaatattgaaatcagcggtaaggatttttcgctgcgcctgcgatgcaccgacgaggagttatatcgttgcctgccgctccctaaagaggccgcaccggtcgctatcaaagccgccaaaaaagggcagttttgggcgacgcatccgatgcaggacaaagccccgatcgccaaggggcctgggtcgaagccggcgactgtctgggattcttgcagtttggtgacctgtatctgccggttcgcagtccactggcggggaaataacccgcctcgcggtggccagcggagagacggtcgggcgcggaagagggctattcatgctgcgtccagcgccagaaaatcggccgattgaagaggtgaaagcatgcgatacattgatttaaacgccgacctcggcgaaggctttggcgactaccgtatcgccgacgatgcctcgctgatgtccattattagctccgccaatatcgcctgcggctttcacgccggtgacgcgagcatcatggccaccagcgtcgcgcgcgctaaacaacatggcatcgatctggggcacacgtcggtttccctgacctgctcggttttggccgtcgccggatgcaaattgacaccgcaacgctggcgcagtacgtgatttatcagctcggtgctctggcggggttcgcacgggtggcagattatccgctgacccacatgagctttcacggtgcgttgggcaacatggcggccgaggacgaggggctggcgatgccgctactgcgtgcggtccagtcgtttgacccgaacttgattattagcacgacggcggggaatgccgtagagcactgcgcgcgtgaattgaagatgaaggtcgcctgcacgctgctggccgaccgagcctatcacgctaacggcatgttggtgaatcgcgccttaccgggggcggttatccacggcgccgagcagataagtgcgcgtattcggcagtggctgaccgagggacattgaccagcattgaaggcgaaaaatccctctcaacgtgtcgtccatcctgttgcacggcgataccgagggcgcagtcgcgttggcaaaacggataagggccgagatagagcagacgccgggctgtgaaattcgagcgatgtcgcgccagttgctgcgggatgaatgattttttccgataaataacaataggatgaagtgtagctttgggcttcataagatggccttattaccacacaccctttatgtcttatccattaaagacattacccgatacagtcgatttaagcctgcaatgtcccgtattacgggcctctgcggcacaatttcaagaggaatgattatgccattttcagattataaaaccgcgttggtgaccggcgcatcggcagggatgggcgaggccattgttgagcgcctgtgcgaagaagggctgaccgtacacgccgtggcacgccgtgaaagtgagctgctggccctggccgaacgtaccggttgtatcccgcacgttattgacgtcagcgacgtggcagcgttgacccgcctgtgcagcgagattgaggttgacgtgctggtaaacaatgcgggcatctctcacccaggttcgattgccaccgctaaagaggcgtatgtcgatgcacaggtcgacgtcaacctgcgcgccgtgctgcacctctgccgccttaccgtgccggggatgatggcgcgtgaccgtgggcatatcatcaatatcacctcgattgcggcaatttataacttcggcggcaactcgatttatcacgcgaccaaggcgggcgtgcacgcactctcgcgccagctgcgcgtggactgctgtggcaaacgcgttcgcgtaaccgaaatctgtccgggacgcgtggccaccgacatcttcggcaacgtgtccggcgacaaagaaggggcgaaaagcagtttatcgacggcttcgagctgccgaccgccaaagacatcgctgataccgtggcgttcgccgtggcaatgcctatcgcggtcaatatcggcaatatcgaaattacccccacgctacaggtgccgggtgggctatccacgctgcgtcccggcgacgcgggttaagcgtggcgttagattattggctgacaggggacgcaatggcagcagtgaaaaacggttttgatctggctgcggtaatgcagggccagtatggcgacatgttggtgaccggcatcgagctgacgctcaagctggcgatgggatcttggctgctggccatggtactggcgctgctgctggtgattatccgcctgtcggagaagcgtatcgcggtggcgttggttagcgtttatgtctcctatcaccgcaacgtccctacgctgatacagctgatgatgtggtatttcgccattcccacgctgctgcctgaggcactacaggactggataaacaatcagaacgccgagtttatcttctcgatgatggcgctgggactgtgtcaggcggcctacttctcggaggatatccgcagcggactgcgcgctatcccggccggacagactgaggcctcgcgggcgttggggatgagctacatcaaatcgatgcggctgatcattttaccccagggaatgcgcaacgcactgccgtcgctcatcaaccatacggtgctgctgtttaagaataccagcctggcgatggttatcggcgtcgctgaactgacctatgtcactcgcgaaatcgaaaacatgaccttcaggacgtttgaaatttatatggtggcctcggtggtgtacctgtttttctcactgctgttaatgggcggcggcgcatgggttgccaaacgttttcagcgcgctatggcgaggtaagaggcgatgtctgatttcttcagcattattcatcagtactggatgctgtttctggtgggccagtatccgcacggctctcttggcgggttagcgaatacgctgctgctgtcggtggttgccatgctgtttgccttcccgctgggattgtgctggcgatggcgcgcatttcgccgttcaagactgtgcgcagcgtggcggcagtgtgggtgtacgtgtttcgcggcgttccgctgatgatggtggtgttttggacctacttctgcgtgccgatgttgctgggtcacgacatcaacggttttgcgaccatggcctgtacgctggtgatttatgagagcgcctatattgccgagattgtgcgcgggggattcaggccctgccgtcggggcagtacgaggcctcgcgtgcgctgggcatgagttatctcaagaccttccggctgataatcttgccgcaggcgctttataacatgctgccgagcctgatcagtcagctagtttccatcattaaagacagcacactgggttacgtgattaacgtgcaggagctgacttttgccgccaatcaggtcagcaaccagctgttgacccagccttttcaggtgttcgcgattgtggcgctcagctattacgcggtctgttttagtctgacctggttggcaaaccgactcgaaaaacgcatcgcccggcaacgtactcgtcatcaaatggcgcaggcggttgctccctcggcggcgttaacccctgaaattacgcaataaggagcagagatgaccccgcttattatgtttaaccaggtcaataaatggtatggcgaataccaggctctgactgatttgagtgcggaaatccgcagtggcgaagtggtggtggtctgcggcccttccggttcagggaaatccaccctgattcgaacggttaaccggctggagccgattcaggacggacagattctgtttgaaggtctggatatcaacggcagcagcacgcggttgaaccatctgcgtacccgcatcggtttcgtgttccagaatttcaacctgttcccgcatatttcggtgctggaaaacgtgatgatttcacccatcaaggtgctcggcgtgcgtcgctatcaggcacgcaaagatgcgatggcgctgctcgaacgcgtcgggctggcgcataaggccgatgcctatcctttacagctctccggtggccagcagcagcgagttgctatcgcacgtgcgctggcgatgaaaccccggtgatgctgtttgacgaaccgaccagcgcgctcgaccctgaaatggtcggcgaagtgctgagcgtgatgcgggggctggcgcaggaaggaatgacgatgatgtgtgtgacgcatgagatgaatttcgcacgtgaagtggctgatactatttggtttatggacgagggcaagatccttgaaaaagcgccgccggagcgattctttactcagccgggacacgcgcgtgcacagcgattcttgagcgatttacgccagcactgatccttatcagagcatttcaatccatttttaggcggtatttttatttaaaattcgtgacgctgtcacttaatattgaacattatcgggtaggttacttatgaaactcaaaagtctttctttggctctattgataagcccgctggcgctaagcaccttgacggcacaggctgatatgctgagcgatattcaggcgcgcggtcagcttaactgcggcgtgtattccgacgtaccgccgttttcatccccggacccgcagacgcgtcagttggtggggatggatgtcgacctttgtggcgcactcgccaaacagatgggcctgaagttgaatctgatgccgacctcggtcgaggcgcgtattccggtgttaactaccggtcgcgttgatgtgctgattgctaacctggcctataccaagacccgcgcctcgcagattcagttcagcgacccttactatgttgctaaagagatgctggtggtcaaggcgccgaatgccggacagccgaaaagcttctttaaagataaacgcatcagtgcgaccaagggaaccacctccgagcagtcaatttatctggcgggcgccaaggcgatcaccttccaggatactgcgtcggcttatcttgcgctacagcagaacaagtcggtcggttttgtgactaacaccatgacggcggtgaagatgatcgatcaggcgaaaaagggcggcgtcgacttggcgatgacctcgttcccgatggcgcttgagcccatcggcgtggggatgaagcagggtgagccagcgctgctggccaaggtcaatgaaagcctcaaagcgatggacgaccagggggtgatcgacaagatttgggataaatggatgggtcctaacacctcttacaagatggtacgcgaagacaaggtgcagccgttgagcgcgttgaagttccaacccttagagtaggggcttttgattgcaaatgttttttttgggtcaagggtgggaggctggctgctggcctgcccagcttttaaggttaacgtcaatgcggtcccttcactttgctcgaaagccaaatacgtctttctcccgccgttcagcgccgtcctgaatccgccgtagagaagacataatccctaagcagttgccgaggcaacaaagaaaaacaaaaaaatcccgtcgttaaaccgagcgtggatttgacctcaaggttgccggtttttgtttaagaggactgttcgcggattcgggactgtgacgggtgaagcgtgacgagacgcgtttgtctcgtcaccgaggcagggaatcgcgaagcggcgcggcctacgccacgtgcgaagcacctgcctttgacctaaaagacctaaacccagatcttgaccttaaaagcaggtccagggcagacgccccccagttccgtacttgtcagatagtatcggccccatcccctctatatctttatatcattaaaacaagcgcggatttagcggaataatctccagttaaccctctgattttctgcgcttgtttttcctaaaaaaatcatcgaagacggaaagagaaaatgaaggcgacttacatcgttatgacagccgttttagcggcagtgactttgttatcaggttgtggagtgcataatgtgcagttacagcaggacagagagcgttgctcgcagtatggcttccagtcgggaacgaattcttttgctaaatgcatgcaggacaccgccatagaacgcgatcgtatctcaatggtagggagtctgttctctaagattaaacaataaatatttaggatggggagaaagcaattttctccccatcttaaattagcaagattttgaacttacgccgtcactgcacggtttccagtgggtccagacggttttttgacagtggtaactcggcgtactgctctttagcccatccattctaactccggtttttccttctccggctcgctcacggcaacaggctgtatactgggttgctcatgcgcggcttccagctcaatcttcggacacataccatagctcggccaatgatccagacgacgataaaccgcaggtgttgttttaaactgctttttaaacgtgcgggtaaacgtctgctgagaatcaaactgatacttatcggcaatgcgtaatacagagttttgcgtcagacgcagttcggtcgcggccatcgtcagacgacgttgtcgtgtataagtcccgagtgtctggccggtaaaacttttaaacaggcgttgcaggtgccattttgagtagcccgatttcgcggcaatggtgtctaatgttaaggactgatccaagttatgttcaatccaatccaacagttcactgacaatactttcgtgatacatattttgattcccccgttaaggtagccatttagccactccgaacgctggactacaatgcgcaattcagccatattatttatcaaatcggccaaatcttaacggagttttaataaacgatgccaattattcaatgccatcccggcgattgtaatcgtgttgctatcgacgatattgagaggccggtgattgcggtaggtgcttcgcgcaccaacggttcatgggaaaaagccatgcattgccaccgtaaggcacagctgatttatacgctcgaaggtatcatcagctgtgagctggagcagggtgtttgggtcgtgcctccgcagtgtgcggtatggatcccgagcggattaatgcactctgcacgcggaacgggcgtgaatcagtgctatagcctgtttgttgaacccgacgccaatctttcgttaccgacctcctgctgtaccttgtcggtgacgccgctactgcgagaactcctgctgcacgccgcgcacttcccgctgctttacgatgagcagggacccgaaggtaagataatcaacgtgttgcttgatcagctaacggtggccgaagtggaagacctttatctgccgctgccgcgagacaatcgtctgcgacaactgaccgacggcatgttgcaagaccccgccgacaaatcgacgttggccgaatgggctgggcgtatcggcatgagcgagcgtagtttgagccgcacttttgttaaccaggttggcgtcagtgttcaccgttggcgtaaacagctgcatgttatcctcgcactacagaaactctcaggcggggcgagcgtgcaaaccgtcgcactcgacttaggctacgaaagtgccagcagttttgtgaccatgttccgcaaggcgcaggggaaaccgccagcgcgctatctttccgactgcgccaacagccccgatttacctattcgtggtttctcgctgtctgaaaatatggcgtgatgtttccaaaatattgttaattgtaatgactgcacaaggaagaaatcgccgatgtctttagggaatatcgttttgatcccaggttatatgaccgatgaccgcctgtgggatgacgtcgttgaacctttaaaagcgcaggggcggcgctgacttttgcccagctagacagcggccaaacgatggatgagatggccgaacgcatcatcgaaacctgtccgcaaaattttgttctgttgggcttttcgatgggcggttacattgcgcgcaagatacagcaacgcattcctgaacgtgtcacggcgttgattctggttgctacctcaagtcgagcggactcggcgttgcagcagcgcacaaaggccagcgctgccgacgcggtcacggcacattcctacaacggattaagtcatctctcgctgggctattcgctccacgttgaccgcagcaaggaccctgagcttttgcagcgcctgaaggggatggggcagcgccttggctatgaggtctttgttcgtcagtcgcgcctggaccgcagcagtgataccgacaggctttcgcaaatccactgcccaacgctggttatcgcggcgcgaaatgaccgtatgcgcagtctggaagagtcaaccgagctgcaaacccatatccccggggcagagcttcgcgtgatcgaaaactgtggtcatatgatccccttgagcaacccgcagcgctttgcgacgaaattattcattggctgaatttgatgccatgaaccgataggtagcagttatattagttacaacatacttaaaagaattttaatgaacctgacctccagctctgacgtcgcaggcgctgtgcaggtcagtttggtaatgcacaaattgtgataacttaagaccaatatgttattaagttaatgattattataaaaatagttgacgcattgtctcagatttcgttctatatcgagcaaaactgagggaataaaaatgtctcaatgcacaacgctgagttctgagcgacaaatgtcctccctgcaacgctggtccgccgtcttgtcattagcgtgcggaacttttgtgttaatcaattctgaattcttaccgattgggctattgtcgccgattgccaaagcgctcaacgttagcgaagggcaggcgggatggaccgtaatgctgcctggacttatcgccgcctttgccgcaccgctgttgatgctattttcacggcgattaaatcgtcgcactttactgctgatcctttccgtttcagtgatactgtcgaacgccattgcgatgttcgctaccgatttatctacgcttttattggggcgaattattcttggatttgctgccggtggcttctggtctttttctatccctgcgggtaaaagattagtttcagaggcgcaaagtgcgcgagcgatttcgctgattagtgccggagtggcgttagggaccgtcgctggggttcccgcgagtgcctatatgggtgagctttacggctggcggatggcctttacgctgaataccctattggccgtggcgatatttatttaccagtggatagccttgcctttattgcctgcggggaattcgataggcctgagcgctatgctgtctgccgcaaaaatgaagggcgttcggcgaggattgattattggaattttcatggcctcggcgcagtattcagcctatacctaccttgagccgtggctgcgtttccaaatgcatttttcctcgtcgtccatctctctattactgatgggatacggtatcgccggatttatcggcacgtttctcacggaattcaccgtgcgcaaatttggcgtccgctatgcctttttaaccaatattctgttcattggggtttgtgtattaatcgcctctcagctgagcagcaatcaggtattagcgtcagtacttatcgttatttggggactggcgtttggtgcactgcctatttgtctgaatatctggatctatcaggccgccctgaattattcgaaggtggttctgcgctgctggtatgcgtatttcagctggctctggcctgcggggcattcttcggcggctttttggcggatactcagggaacctacgccgcttttattcttggcggcgtattggccttgatagcgggcctgagcatctttctttcccatcctcagagcacaacgaattattaaggagcatatcattggctcggttgctgccagcgaacgcccccggatttatttagcctgattcattgaaatgaatcaggcaagcggcatgcttttctcttttacctgaagaaacgctcagaagactctgtgatcaggtcaattaaccgatgttgacgcactgcatcttcaaatgttgtcacttcgctagtttcagataatttatccctggcataggctgaatacagataagcaacgtcctgtgaactggcatcaagatgagatacaggtaaataggtatattcagctgggacagggaggtcgacaaactgttcgacaccattgcgcattccctggattaagttgtcatcttcattctggaatccacgtgtattcgtgatgcgtaaaacaccttctgtaccggtgatgtcaatctgaagtcctgtacgtagtgtctgtccgccttcaagctgaacagaaaataatgcatcatttgccagagagcctatgatcatgacctcgttagggccggtataggggatcttctcacctgtttcggcaatcgttgtgatcgggaactggtttttaatgacagccgaaagctgttgagggaagcccacacccttgaaaagcatatcgtggaaatgaccaccatagatggataacagttcagtaaagttccctacgtctactgcccattttgcaaactccggcatgacttcgccaaaggcgtcaacgcccacggacattcgcactgcgcggattttacccacataaccctgtttaatcagatcatgccagtatcgggaactgggtgagaaacggcgctgtaacccaacaatatgtttgacacctttgtcacttgccatcgccagaatttcttctgactcagtcgtggtggtggaaaggggccactcactgtagacatcctttcctgcttcaatcactgcctttgccattcgtccatgttcaggtgtcggagccagaacaacaatcaggtctatgtcggggttagccagtaacgcctcggggctaccgtaagcctggctgataatgaactgtgcagcatatttttccactttctctttgttacgaccagcgagtgccacaatctcaaaatcactcaacgactggagtgcaggaatgtgaccatatctggcccagccaccggtaccaataatacctacgcggattttactgttgttcatactgccttcttttatcagattatttgaatatcaggcaggctataagaatcagccccctgggatagaggcaataatatgatgatattcctccgggattaatcgggatgaatggcataacatatgtgacatttatgtcactaatgattcggtgcttgaaatgatggaaaaaatgaatggtcttgaagtgtttgtacatgtagcgcagacaaggagtttcatcgcgacagggcgagtaaaaggcatttcatcgtcagcagtcagcaagagcatttccaggctggaagaacgtctgggtgtacgacttttccagcgaagtacacgttcggttcgcctgacgtcagaaggtgaggtctttctggaacgatgtcatcgtatttttggtgaaatccaggccgcagaggatgaactgtcagcgatgacagaacagccacgcggaaggctccgcgtcggtctgccgctggcgggagggctgatgttacccatgatttcacaattcatggaacgttaccccagatagaactggaccttgatttttccgacagattgtctgatgtcatcgaggatggaatggacgttgtcattcgtggcggtgagttgagtgattcaagactaatatcccgtcgactcggatcatttcaattgtgtatcgttggctcaccagattacttcaagcatcaaggaacgcctaccagcccagaagacttattcggtcattcttgcctgcactatcgctatcccaattcagggaaaattgctcagtggccgcttcaatacgctgtaacccgaggcggtattcaggctgttcctttaacactgacttgcagcagccttgaagtcctgctgtatatggtgaaaaaaggtcgtggtattgcctgtttgcctgattactcggtaaaagacgcgctcgccacaggtgaggtggagccaatcctgaataatgatatgacgcatacaaccacttttcatatgctctggcccagcacgcggcagatgacaccgaaggtccgtgtttttgtggattacatggcagaagtatttagcgactacttggttaagaaccaaaagtaagtcgcagagagtttcacaccttcggcccctacagggcaataaagagccttagcgtaggatagattccgttttccaagcggacccctagcttaactcgccacgctgctgtagccagtcacggaattcgtgtggccacaattgggtcggtgagcccggtttccccatcccgaaaccgtggccaccgctggcgagtgggtgcagttcacagggaacgtgcgccttttcgcaggcctgctgcatgataacggtgttcattgggttagagacggggtcatccttggcctgaaccaggaacatcggcggggtctgtgggttaacgtaggtctgcaccgaccacttcgctgcctcctgctcatcggcgtctctgccaattagaatatgcgccgttgaggtatggtcataaggcgcttcgagggtgattatcggataaataagtgcgctgatgtcgggcctggcgctgtgattatcagtcgcgtcctggggcggataagactcaaaatcggcgcgaaccgaggcgagcccaagcaggtgcccgccagccgaaaagccaagcacgccaatctgattctttttaagaccccttttttccgcgttggcacgaatcaggcgcaacgcacgctgtgcatcctgcaaggggccagtggccccacgttccagccttcatgaggcagacgataggttaaaacaaaggcggtaatacctctttcgctgagccactgagccgccgggtgtgcctccgtttccatttcgatacgtttataacctccgccggccgcaacaagcattgcagcgccgttagggtttttcggcctataaaccgtcagatatggctggctaatattgctgatggccccgcgcttgtcgcgtttcatcggcccggaaggacctccgccgcccggtggcgtttgcggccaaagcagcagagtctctgtatcggtaatggttagcgtgttatgcggccgttccttggcattaacacatcctgcaaacaaagccgcgctggctccgagaataaaattacgacggttcattcaatcacctgcaatcaataaatgtcgagatatccatgaagttactgatgaactcctgatttaccctgatagagttatcaacgaaaagtgatgaaatcatgagtttatcttaaagttgttcagtggtttttccgccagcggaaacatacggcagcatagtgaaaaggaaggggaaaagtcagctcactctaactcaaaaaatgttgcataagtaatgcattttaaatcctttaggccgccggtttggcagtgataatcttgagttatattcaccaggggtcagttatgtctcattcaaagatttcttcaattccgattattgacctgtcaaaactcgacggttcagacgctacccgtgccgaattcctcaaagagctgcgcgttgctgcccgtgatgtcggcttcttttatttaattaatcacggcgttgatccgacgctgttgtcgcaggttcaggggacttcacgagactttttcgcgctgccacaggccgaaaaagaccgtgtggcaatggtcaattcccgacactttcgcggctacaatcgtgcagcctcagagcgcacgcgagggcaacccgactggcgcgagcagtttgaccttggcgcagagcgtcagccgattccgcagacagagcattcaccggcgtggtctcggcttcagggccaaatcagtggccagaagccttgcctgagttaaaaccgctgctgctgaactggcaaaaagccatgaccgcgatgtcgctaaaaattctgcgcgcctttgccgagtctctttcgctgcccgtggactcttttgacccgctgtacggcgataaacctaatgagcacatcaagctcattcgctatccaggccgtggagaaaatgagagtaatcagggcgttggcgcgcacaaagactctggcttcctgagtttcctgttgcaggatcagcaaaagggactccaggttgaggttgaagaggggcgttgggttgatgcactgccgattgaaggttcctttgtcgttaacatcggcgaactgcttgagctggcaaccaacggttatcttcgtgccacggtgcaccgtgtggttgcaccgcccgtcggcaaggaaaggctgtccctggcgttcttcctcggtgcgaagctcgacgccgtggtgcccgtatttcagctgccgtcagagcttgcagcccaagctaatggcccggaaagcgacccgcagaatcccctgttgcgagacgttggctggaactacctgaaagggcgtttacgctcgcatcctgacgtagcagaacgctattattccgaactgttggtttcttaaaattttaaaccaagagcaagccagtttaacgatgagtgaatagataaaaattggcttagcaattctcttttaattgtttagctcgcgagattcaatatgattggatagcccttgaagataatcaatcaaaaagggctatttttatgtcgacaggtaaaatttcatttttggcatctttgctattaatggcggtaagttcttcagggtatgcggctgacagtgcaaataaaacgattactcttggatttaatcccggaccttatgaggaacagtttgccaaaggtgtaggaccctttctcgaggccaaaggttataaactggtttataaagactttagcgatggtattcaggtcaataatgccgtagccactggcgccattgacggcaatattatgcagcatcctatctatctccaatccgttaatgatcgacttggtattgataatgttggtattgtccaggtgcccactccgccgatggggctgtattccaacaagcataaggccggtgaaaaacctcagcccggtgagactatttcagtacctaatcaggcctctaatgaatatcgtgccgcgctgctgctccaggatctcggctggataaagatttcggcaaaatctgaccctgccaccttctcgcaaaaagacatcaccgaaaatccttacaaactggtattcaaagagatggataacgcgcagcaggttcgggccttaccggacgtagactatggcgctattcagggcaatttcgccgtctcgagtgggatgaagcttaatagcgcgctcaagctcgaaaatccggtaaaaggctttattaacgtggtcacggtggcgggtaaaaataaagatgcccagtttgctcaggatattgtcgcaggctatcactctgccgagttcaaagaatatattctctccaaccctcagtatcagggttacctgttgcctgactacttaaaataataatcttttttactcgtcggcctggctgacgagttttttgcttgctttgtattggggagaggaaatgattgagctgcatgacgttgataaggtatttcagcgtaaaggtattacgacacgcgcactgaacaatattaatttacgcgtcgagagggggatattttcggcattatcggttatagcggtgcgggaaaaagcacgctggtacggcttattaacgcgctggaaacccccagcgcgggcgaggtggtcatcaacgggcaggcgatcggcgattttaactcgaagcaactcagggaaatgaagaaagatatcggcatgatttttcaaggcttcaatctgctggagtctaaaactgtttggaagaatgtcgcgatacctctgattttagccggaaagagcaaggcctttattgccgaaagggtgaaagagcttcttcagttggtgggactgggagaccgtgcaggcagctatccgggcgaactttccggcggacaaaaacagcgcgtgggtatcgcacgcgcactggcgactaacccctcaatactgctctgtgacgaagcaacctcggccctggacccacagaccaccggacagattctgatgttactcaagcgtattagccatgaatttaacgtcacgctagtgcttatcactcacgagatgtcggttatccaaaaaatctgcaacaaagtcgcggtgatggaacaggggcggattgtcgaacaggggaacgtcattgacgtatttgggcatccccagcacccgaccacgctgaattttgtgcgtacgctggttcgcgacagtttgccggaaagcattgagccgcattcacctgcgaataaccgggtgcggcgtttccggctggaatttgttgccgagacggctggccagccggttatttatcagatgagcaaggccttcgacctcgaatttaatatcctgtttgccagtatgtcagaaattcaggatacggttctgggctttatgattattcagttaagcggtgaggctgaagtattgcgcgcagggattgcctatttacagcactgcggcgtgcgggtagaggaggtgcaataatgttcgatacggctattactctggaccagtttcttggcgcgatgcatgacactctgctgatggtcagcgtttctttgctcattggctccttgctcggggtgccactcggtattttactggtcatcactcgcccaggcggactggttaaccatccttttttctataggattattaatcccgttattaatattgtgcgctcgctgccgtttattattctgatgatttcaatcattccgtttacacgttttgtcgtacacaccacgattggcactcccggggcgattgtgccacttattatctatatcgcgccttatattgcgcgactggttgaaagttcgttattggaaattaatccgggaattatcgaggctgccaaatcgatgggcgccacgccgttacaggcaatctggcatttcctgttgcctgaggcactggcgtctctggttcttgccttaacgacggcgaccatcggcctgattggcgcaaccgccatggccggaaccgtgggcggcggcggaataggggatctggccattacctatggttatcagcgctttgacacctttgcaaccgtctcgacggccattgtcttaatcattgttgtacagggtctgcaatcgttgggcaatatcctctctcgccgcctgcgtcgtgagtaataagagaggggcatttaatattaagtaagctttgaacataatttagtctgcttctattttattaatgccaccggctgtgcctgtcatctcttgaatagattgttgctgagggccgctggtggccctcagcaacgacaaatgcagctttccagataagtaatgccaaaaggattatttcatttcttcggcgaatattggtttactgaattcagtcgagggaatactccccaaagaatacagcaataaggagtgaatgatggccaaaaatttaaacgccaattccctatggcaaagaattaagcgtcgatgttctgcgactttcctgactcagactacggcagacagttctcgattggttgaatcactccttgtgacaggatctttatatggcattgaactcggaaatattgacccttcctggtatcgccagaaatagtcaatatcagcggctactgcgccgaagctattggaatgagctgtgctaagttaacaacggtaatgatgattttctcctgaagtgaagcagtaaatgttgagatctccccggtcttgtcgaatgtgattttctatcccagttgtggagcctatgacttttaagtcataggtttttttatttttcggtttctcttaactggctactcttgctcaaaattgtcgtaaacacggccaaccagactgagcaactgttgatgctcctcctcgctaaagccgcgaataccgagcttatttagccgttgcccctgctgttgcatcgtttttctgatttccagaccgctttctgtcaacgtcaaacgcataatgcggcggtcgagtgggtcactgtcgctggtgagtagacctttgtcgcgcagacctttaatcagtcgcgccagctgtgctttgtcacgctccataaaacgcgataaatcccccggcgcagcgcctggatttctgcctacgtagctcagaactttcgcttccatatgggtaacgtcgtggttgccatcgcgcagcatttcaaactgtttagcgcggtagcggtgcatgatcatatgcatgacccacagtacgtcttcgttatgcgattcacccatgagttgacaatgtctcctattctcatttagattgttgatattatcaactaagtggaacaatcttaccatgaccgaaaatacatcaaccagccgagtgcagcttattcgccatgaaatcaaacgacgcacccttgacgtggttagcgtagagcaaatcagcccaagctttaagcgcatcacctttagcggtgattcgctgtctgattttatcagtgcatcgttcgatgaccacgtaaaatttattgttaatcccgaagcagccgagcctgcgatgcgtgattacacgccgcgtttttacgataatgacaaaaaagagttagtcattgagttcgcgatgcatggggaagggccagccaatgagtgggctgaaaatgtgaaacccggtgaccaggcgatgattgcgggccctcgcggttcacgcgtgattccgatggactacgactggcagctgatgttcggtgatgaaaccgctttcccggccatctcgcgccgtctggaagagctaccgggggtacccgtgtgaccgtggttgcgctggcaaacgatgtgcgtgaccgccgtgaatttagccagcaggccaatccagagattatttgggttgaaagctccgagcaactggttgagtgggccaaaaaccatcagctcgccgctggcgaaggctttgtgtggtgtgcggctgaggcgtcaatcatcaagtccctgcgtaacatcttcgtggagcagaaagggcatgatgttaacgctattcgtacctcggcctactggaagatgagaacggctgccttccacgaggagctgtcttaaatggcaatttgtttttaaattgcattttttaggtcaagggcacgtgctttgcacgctaagcgctggcccagaccagccaaaggggcttacaggcgaagccccgttggattcccccgccttgttatcggttcatgagtcgtgccagccggtgagtctgtttcagtgatatcgaatgtgccgtggtcccgcgccgcttcgcggttctcttgcccggttacggcgcggaaagttaaatgccccttgaagctttcaaaccggaaaagcgcctcggagttaattgacctcgaccttaaaagctgggcagggcagccgcccataaacattctcttcaaagaaatgttgcaataaaaagcccaccccctattgagccgacgaagaaacctaccggccagttggtttcataggaaagggcaatcgccagccacacggtgataagcgataccgctatcgacagcaggacggcaggaatcggtcttgaggtgatccggtgtgctacggcggcaggggcaaccatcaggctgaacaccaacagcgcacccacgaccggcagggccatcgctgtggctaacgccagtaggcacagaaaccataactccatcttcttcaccgaaataccctgaacctctgctaactccgccgagactgagtttaacagcagcggataaaatacccgcatcgttatgccaatcaccaacaggcttatcagcgcaacaggaatgagttctgcgcggctgactcccagcacctcgccaaaaagtagtgcataaacctgctgcgaatattgactgctcaggcttaaaaataccgtaccgaggcttagcagcatcaccagcgtgagtgccgtcgccacctcatgacggccattttttgccaactgattaatgcccatgacacccagaccggcgaaggttatcaggccgataaaactgttaatacctaacaggccagccagcgcggcaccggggaatgtgcccagcggcagcgcgtgggccgcgaaagatgcgccgcgcagaacgacaaagaacccgaccagaccggcgactatcgcgaccagagtcaccactatccagggattgatcataaagctggagaacatgttaatgacctttcaggcgaataagatgggttgaagccagataggcgataaagatgagtgccacaataaagaagctgactggccagccgtggccgggggtccagtaaaagctgtcgtaggccagtacaatcccgccccatgtcgccactagccctaatattgtggccataagcatcgccataagcggcctcctggtaatacgcagcgccgttgctgccgggccaatcagcagtgcggtagagaggaccgcgccgacggtcatcgccgacagggtaaccgccagcgacagcagcattagatagaaagtcgacacccatcgggtcctgatgcccatcacctgcgccagctctttatccagcgaactgagcaataaaggacgatagataacgatgataaccgccactgcaccaccgccgagccacagcgcaaggggaataatcgttggggaaatggcaaacatcgacccgaacattacggtcacggccgcgcccgtggtgctgcgtgtcgtgacatcgaagtacagcagcagtgccgccagccccagccctgcgcccaatacaatgccggtcatcaggtcacgttcgcgggcgcggcgaatatcgataatttccatggtcaatgacgccagcagcgccatacccaagaggcctatcagaggattaataccgagcaggaaggagagcgcacctcctgcgctgctgacgtctgccagcgcgtgacccgcgaaagactggccgcgtattaccgtgaatacgccgaccacaccagaaacgatggcggttccgctgcccacgatcaacgcggtttgaaccgggtcgctgctaaagaatccggctctactatgaaatttatcagggaattcataaaaaaatcatgctttcatcaggttttcagggggcgaagtcagggcacagacgtcactcgatgcattggcagcaatcaccaaaacccgattcatgacgcgtaatacctcgatggggtaaccataaagccgactcagcacgtcactttgcacgacctcatctgttttgccgctggcggcgcgcccgttagccagataaacgatgctgtccatcgacgacagcagcgggttcatgtcgtgtgcggagagcagaatactgacctgatggacaatacagaggtggcgcagaagcgccacgatttctgatacgctgcgaatatcgagattcgccaaaggctcgtcaagcagcagcaggtgaggtcggcggatgagggcgtgagcgattaacacgcgctgctgctggccacccgagagattgccgatacgctcatcggcaaaactttctgcgccaacctctcgaagcatggcgtcaacctgctgcctcacggcgcgcgagttgagggcaaaacccagctgcttaccggtcagccccagcgtgacgagatcccgcgcgcgcagcggtatttcggcatcgagcatgattttctgtggcacatagcccaccgagtgtagacctgccttgcccatttttccgtctattcgcacttcacctgcgtcgagcgactgaaaaccgagcagggcgcgcagtagcgtggttttgccgctgccgttggagccaatcagtccacaaaactccccaggcttaaggccaaagctcactccgtcgagcaccgtttttcccgcataggaaacgctgagatggtttgcgctcagcacgccgccgtcatccacgttcatcttagtgcctggccagcaggctttcggtggaggtctggtctgttaacgccttaatcagcgcgttggtctcagccagcatccagctttgataatggtagcccggggttggcatggtttcatacacgccgaccacggggatatggtgcgtttttgcctggctgaggaaggtctcagtcagtgggtccgttacctgctggttgtatacgaagactttgagcctgccgtcagcaaaaagcgcattttgcgcggtgacgtcttgaggcgcaggatcggtgccgttcatgatagcggcctcaagattgaacggtgtcgcaatcttcagccctgcggcctgaagcagatagtcgccaacaggttctgtgaccgccacttcactgttggaatacgcgcttttcagcttgtccagtgcggcatgccagggcgctaaagaggcggtaaacttgccggcatttgcattgaaataggctttttgatccggcatcgccgcgctgaggtcggcggcaatctgtttcgctactgcgggcatgacctcaggcttgtaccacaggtgcgggtttgaggtcttgtccggcagattcatcagctgttgcacgttgatgaccttgcgtgaggcgttgggcgctgcggcaagaaacttgtcggtccatgcgtcataacccaggccgttcatgactaccaggtcggcatgcgctatctcggcggctattttcggactggcttcgaaggtatgagggtcagtgttggggtccgtttcaatggcctcaacctcaacaaacttgccgccgatttgcgaaatcacgtcggcatactgattttcaacgccaatagcgtgttgaacgggcgtgatggccgccccagcttgaccagcgctgagagcacccaataccgtcgcttgcgccacgaccccggctaataccagtaacttacctttcatcctgtcccttaagttgataataatcacatcaaattgatatgttataacataacttatatgggcatgggattgactacaagataccagacgtaaccagttgtttgagaatgtgtctttcagggcgagcagtcagttcattgcctcaagcagcgtcaccatcgctttctggttggccgacgcgctgcctttacgccacatcagccaaatcttgatttttcccatctcgttgccgagcggatagatttttacaccgcttttgcctggcatgctgtcgagcatgctggcaggaattaacgccagtccggcgccggcagtcacgcaggcgacgatgccgtgataagactccatttcgtgaatctttcccggcactgcctgatcgttggcaaaccagttctcaaacagccgacgataagaacaattggcgcgaaacgcgtagatggttgagccggagatatctttcgctcggttgacggccgggtggttcaatgcggcaatcagcaccatttcttcatcaaaaaccggtactccttccagttcaggatgttttggcgggccgtcaacgaaggccgcactgtactgaccggacaaaattccgtcgatcatgtcgcccgacgggccggtcgacagatccagctccacgtcaggataagcctgatgataacgggcgagcaccggaggaatgcgcacggcggcacagctctcaatcgaacccagggtaaatatgccgtttggccgctggcccgacacactctgctttgcctcttccgccagagccagaatgcgttttgtataactcagaaaggttttaccggggtcagaaatgtgcagccgaagcttctcgcgatgaaaaagcagtgtgcctaactcttcttctagctgtttgattcgggtcgaaatatttgacggaacgcggtgtagccgttctgcggcagcggtcacgctgccttcctcggcgacggcggcaaaaacttcaagctgtgtcaggtccatggcttctctccagtctgatttcgaactaagttctttctctaaacgagacgattactttcattattattcatttttcaaaaacctttaacaagtctaggattgacggcagatagcgttaatcctgactataaaggtgaccacagatgactaatacaacgacagcgcccgctggcgcattctcccgtaatccaactaacggtgacgttttcaaacattatcctttcgcgaccgcagaggaagtagattctgcactgaagggcactcaagatgccttcaacgactggaagaatactgacatgccagcgcgtattgcgctgttgcagaacatcgcacgtgagcttcgtgccagtgcgggtccgttggctgaaatgatgacgctagagatgggtaagcctgtcacgcaggcgcttgccgaggtcgagaagagcgctaacctgtgtgaatggtatgctcagaatggtccggcgatgctcgcaccagaaccgacgctggttgaaaatgacaaggcgtgggtcaactacctgccgctgggtccggtactgtctgtgatgccgtggaatttcccggtatggcaggtgctgcgtggtgccgtgccgattattttggcgggcaacagttatttgctgaagcccgcaccaaacgtcatgggttgtgcctatcttctgcgtgacattgtcactaaagccggtgcaccaaaaggcctgtttgacgtctataacgctgacaacgcggccgtcgccgaaagcattaaagacccgcgtattgcggcgattactctcaccggtagcgtgcgtgccggggcggctattgcctcaatggccggtgctgcgctaaaaaaatgtgtgatggaattaggcggttccgacgcctttatcgtgctggccgatgccgacatcgatgcagcggtcaagggggctatcgccggacgctttatgaataacggtcaaatctgcatctcggccaagcgtattatcgttgaagaatcgattattgaagagttcaccgagaagttcctcgcggccgttaaggcgttgaaaatcggcgatccgcgcgacgagtcaacctaccttggccccatggcgcgctttgatctgcgtgatgagctgcacggtcaggttcaggcgacgcttgccgagggcgcgacgttattgctgggtggtgagcctatcgaaggtgcgggtaattactatgcgccgacggtgctgggcaacgtgaaaccgggcatgaccagctttgttcaggaactgtttggtccggttgcgtctcttatcacggcgaaagatgccgccgacgcggtgcggatggccaatgattccgagttcggcctgggtggaagcctgtggagccgagacctcgacgcggcaaaagcgttggcgaaacaaatctacaccggtgggatgttcattaactctccgagcttctcagacccacgtgttcccatcggtggggtgaagaagagcggtttcggacgcgagctgtcgcacttcgggatccgggagttcaccaacccacaaaccttatgggttgaaggtctttaatagcaaattttttaaggacaataggcaccggggagtttttttggcagcggcccttaacctgcttttaaggacaattaactccgaggtgcttttccggtttgaaagcttcaaggggccttggcctgggaaggccccttggcgggtctgggccagcgcccagcgtgcgaagcgcgtgcccttgacctaaaagacctaaagatctagatctaaaaaatgcaatttaaagaaattgtcatttaagcccaccccctaatgattcccacagtgtaatgcggttctcgaagtcggtttgctgtagggcgaccaggttcagctgggatgaccacagcgtgcgctggtcggtcagcactgtcagatagtcaccggtacccacctcatagctacggcgggcgagatcgtagctgcgctgcgccgctgcgaccgcctgcacctgcgcgtccatctgctcattcaacgtgctgcggcgtgcaagggcgtttgccacgtcttcaaaggcggtttgaatcgctttctcataagcggcaatcaggccctttttctcggcctcagcgtagtgcaattgcgccagattgctgccgccggtaaacagcggcagcgtaatgcttggcgcaaatgaccagacgttggcaccgtggctaaacaggttcgacagcgaactgctgccgacgcccgcgctgccggtgagcgaaatggtcgggaagaagttggcccgcgccgcgccgatgtccgcattctcactcttcagattgtgctcggcctcaatcacgtcagggcgacgcagcagcacgtcagacgacacgcccgccggaacaatggcaatcgcctgcggcgagaggctctcaatcgtacccggcagcaggttggcaggcacggtatcgccgaccagcaggttaagggcgttgatgtcctgcgcgacctgcgttttatcgctggcaacggttgcccgcgcctgttgataggtgctcatcgccgagctgacatcgcccgctgccgccgtgccttcattcagttgcaactgcgtgatacgcagggtatcggcggcgcttgccatggtctgctgcgccagcgccagattgctattatccgccgccagcgttatccaggcggtggtggtctcggacaccaaggtgatgcgggtattttgcgccgtcgcttcgctggcaagccaggtctctttggcggcgcgggccagactgcggttacggccaaacaggtcaagctcaaagctgctgactgcgccatccgcctcagcagaactgctgatcgcacccgatgaggagcgggcacgcgtctgcgttagctcggcgtctaccgtcgggaacagcgacgctcgctcttcgccgtacagtgcgcgggccgcctcgatatcggcaatcgactcctgaagatcacggttgctaaccacggcacgttgcacaacctgattcaggcgtgggtcagcgagcacgtgctgccagtcggtcaacaccgccttggcatcggcattcgcgccctggcttggccaggtttttggcaccggtgctgcgggtctctgatagtccgggtcaagcgagatacagcccgccagcagcatcgacaggctgacaacgctcaggcggaagaaattcttatgatgaaacatcgattactcctcgttcacgttacggcgagtgaagaagtgtttcaccagcacaaagaaaagtggcacaaagaaaatcgccagcagcgtcgctgtcaatgtccgccgataatgccggtcccgatagcgatgcggctgttggcccctgcgcccgtcgacagcgccagcggcagaacaccggcgataaaggcgatagaggtcatcaggatcgggcgaagtcgcgttttcgccgctgagattgccgccgcagaaagggtcattccctccttcacggccgcttcggcaaactcgacgatcaggatggcgttttttgacgacaacccgatggtggtcaacagcgccacctggaagtaaatgtcattatttaatccacgcagcgaggcggcgatggacgcaccgagcacgccgagtgggataaccagaatgaccgagaaggggaccgaccagctttcatacagtgccgccagacacaggaagaccaccatgattgagatagcatacagcgtgccggtttgaccgctggctaactgctcttgcagggacaatccactccaggcaaaggtggagcccggcggtagcttggacgccagttcagccatcttgtccattgctgcaccagagctgtaaccgtcggtgttttcaccatcgatttcgaaggacgtcaccccgttatagcgtgccagcgactgaggtccgtacatccagtgcgtggtagcaaaggcagagaacggcgtcatggtggtgtcaccgctgctgttggtgccgcgcacaaaccacttgttcaggtcacttggctgtgagcggaactggctatcgccctggatataaacctctttgacgcgaccgcgatcgataaagtcatcgacgtattgtccccccaggcgtcactcagcgtcgtggtcacgtcactcaaagacagacccaaggcaaccgccttattattatcgatatcaaccttgagctgcggcatttctggcagatcggccgcacgaacagactggagctctgggcttttattggcctcatcgatcagtaggttacgtaatttcagcagttgatcgtgggaagtgccgcccacagacatcagctcaaaggtgaagccgttactctggcccatgccggataccgcaggtggggtcatggcaatcactttggcatcggtgattttcgccagattcttgttggcgcgctcaacgatagcctgcgccgtattggccgaacccgagcgtttatcccagtctttaagggcgataaaggccatcccgacgttatcaccgttaccgttgaagttgaaaccggtaatggagaacacgacgtcggtgttcgctttctcctgtttcaggaaataatcggtaacctctttagtcacctcattggtgcgattcaccgaggcgcctgcgggtaaggtgtactgcaccatgacctgtccctgatcctcattcggcaggaagctggttggcaggtgcatcatcagtaaacccatgaccacggccagcagcgcatagccagtcatcatcaccgcaggtcggcgcatcccctttaacacaccgtgtttatagcgatgttcagtgttggaataaatacggttgaagccgccaaagaagcctttggtgtgtggcttactgtggcgcagcagggttccacaaagagccggggtcaaggtcagtgcaacgatgaccgagagtgccatcgcagagatcaaggtcaccgagaactgacgataaatcaccccggtcgaaccgccaaagaaggccatcggcaggaataccgcggagagtacaaccgcaatcgccaccagcgcgccggaaatctcacccattgatttctcagttgcggcgcggggtttgagtccctcctcggtcattattcgctcgacgttttcgaccaccacgatggcatcatccaccagaagcccgatggcgagcaccatcgcaaacagcgtcagggtattaatggtgtaacccagtgcagacagcacccgaaggtccccagcagtaccaccggcaccgccagtgcagggatgagcgtcgcccgaacgttttgcaggaaaagatacatcaccgcgataaccagcacgatagcgataagcagagtttcaaccacgtcctgaatcgaaagcttgataaactctgtggtgtctttcgggtaggccacttcataacccgcaggcatgctgctgcggtatttctcaatggtggctttcaccgcgttggcggtatccagtgcgttcgatcctgctgcaagctgaaccgcaaggccggccgccggatggccattcagactcgaggtcgtaagatagtcctggctacccatttcaacgcgcgcaacgtcaccaatgcgtacgactgaaccgtcggcctcacttttgacgatgatattacggaactgttcaggcgtttgcagacgggattcggcctgcacggttgccgtaatctgctgtgatgaagaggtcggggatgagccgatgctacccgctgacagctgaatattctgcgaagagattgccgtttcgacgtcggaaggcatcaggtcgtaggccgcaagtttggtcggattgagccagatacggatggcatactggttaccgaagacgttcagactgcctacgcctgagacgcgagccagcggatcctgcatgttactgaccagccagtcggcaatgtcacgacttgaggacttgtcggtcttgtcatacaaggtcgcaatcatcaggaagtccgactgcgacttggtcaccgttaaaccggcctcctgcacttcggtcggcaggcggattctgcctgctgcagtttatcctgcacctgaacctgcgcggtgtcggggttagtccccaatttaaagctgacggtaatctgcaccgtaccggccgaactgctggtcgaggtaaagtagagcaggttatccagaccggtaagctgctgttctataacctgagtcacgctgttttcaatagtctgggcagaggcaccggtataggtcgccttgatcctgaccgagggcggcgccacttcaggatactgcgccaccgccatcgatttaatggcaataatacccgccatcataatcagcagggcgataacccaggcaaaaaccgggcggcgtacaaagaagctggaaaacatcacgacgctccttgtgtcgccgccggcgttgtggcaccgagctgggtttcaaccggtttaacgacttgacccgcgttaaccttggatgtcccttcgactattacgcgatcgcccgcctgcaacccactggaaattaaataatcatcgcccgacgtggtgctggttatcactttgcgcaccacaactttgttattggcatccaccaccattgcggtggcattgcctttcgggtcacgaatgatggcttgttggggtgccagaatcgcattttcaatcacgccttcatcgacgcttgcgtgaacaaacatccccggcagaagaacgtgctggggttagggaacacggcgcggagagtcacggagccggtagcctcgtcaacggaaacttctgtcaactcaagtttgcctttctgtggataaaccgaaccgtcttccagcgtcagagtgacgtcaagggtgtcactatttttggcgagcgcgcgtttgcgcagctcaagcaggtctacgctggagcgggtgaggtcaacgtacatgctgtcgagtgcggtaatggtggtcagtgcggtagtctgattggcggtgaccaacgcacctggcgtcacggtcgagatgccaatacgccctgagatagggccgtcacgcgggtccagtcaaggtttatcttgtctgcttcaagcgcagcgattttttcggccacgctggccttgtcttcgccacaggtggcggtggcgtcgtcggcgtcctgctgcgaaacaccttgctctttaaccagaatggcgtagcggcgggccttttggcagtcggcgataaccagtgccttggcgctttgcagggcagcagcggcctgatcgtaagccgctttataagtcgacggatcaatttgataaagcgcctgcccggcctttacctcgtcgccctctttaaacagacgacgctgaataataccgccaacctgcggcaacacggttgacgtcagcgtggcggtggtgcggccggtgagatcgctggaataagtgaaaggttgagactttaacgtgaccacgccgacctgcgttggagccggcttctccttggtggtgttatcatgacaaccgcttaatccgattatcgtcaaaatacataaaatgcgtaattgcatagaaggagtccaatgaatagagtgatattgttttcggctcacaggtatttctgcgacagcgtattaatccataaaggatgccgtgcacgagttatcccgcacgagcgggttttcagaatgggtgcgaattctgaatataaactccaaacaacaataaaggggttataaatacccctaatgacgattaagcttcattaatctttttagtggcctcctgaatcgttcttgatattttctcgacctcgtcctgggtgatgttttcattacgcattttaattttcacacttgttttaaggttttcgattgcgtaataaacctctggattctttacaggatgtttcgataattccaatgctttaagtctttccaatgcatcgaccactgtctgtttatgctgctcaagatagtgctcaccgctgcgggtgattgtgtacttttttttggaaccatcaacggcttgcgccaccgcgtagccaagctcttctagcagggtcaggttcgggtaaatcacaccgggacttggactgtaagctcccatcgaatagtgcgctatcgactttatgatttcataaccatgcgttgtattaagtcttacaaaataaagaatcagtaacagcagttcttcatttttaaacgttttaccccgacgttccggcatttttttgtttggggcatgaatagcgctggtttttctcatcggtaacactgtctcatttgaaaaataactctcaggaacgaaagggagattaatctgaagatatatctcggactctcagcggtcaagatatatcttggttgatctttgcgtgcttaattgattgataatgaatgataaatatcaattgtggaattactgtgaggcctgtttttgaccttgggccagaatgggggtaaatatgcttaacgctatgttttatctttgtttatttatttcatctttcaaggtgaaattcagactatttcttaaataaagcgccaagtgtaaagaaatcgaaaattttgggttattaaatattaaggagtaaagataaagattatttttaatgaatctcgagatttatccatgagttatcaatacacattttgtatcatacccgactaaaaaaattacctgttgcctataaaggtctactattaatttgtttcaaagctcttagtattgatttctaattagttggcccaaaaggaaggggtttaatgatttcaaaaagctttactcgactctggcaaggtgtcgcggtattttcattgtttaccttggtcacaatgaccgaggctgcacaacaaaacgtgcctgcctctggccctctaaatatgtaacaaatcaacctgctgccgctgtaacaagtctgacgcctgccggacttattttgcctgcggtaaaatcggtcattgactgttcggcactgactaaaaccgaccttactgccctcggtggagagggaagccacattatctcggcgaaagaaacgcagaccaatggcagcccattttgccaggttgacggtgtgttaagcccggctgttggctttagggtcatgctgccaaccacccgttggatacagcgttatatgcagattggctgcggtggcctttgcgggagcatccgaactgaggttggagctgcggcaggctgtacgccgcttaatgcaaacggctttgtgataggtgccaccgatatgggccacggcatggatgacgacgcctttggcaattctgcgcaaaagcgcgtcgactttgcctatcgcgcccagcatctcaccgcactggtctccaaacagctgatcgccgcctattatggtcgcggtccaagttattcatattttaacggctgctctgacggcggacgcgaagcgctgatggaagcgcagcgctatcctgacgatttcaacggtattatcgccggtgcaccggccatgaaccttcaggtgcaaaacgcgatattcaacgcctggctggtgctggccaacaccggtgccgagggcaaacctgtcattctgtcctcgcgtttgccgctcatccacaacgcggtgctggcacagtgtgacgccgaagacgggcaggttgatggtctgatctccgacccgcagagctgtcatttcgaccctcaggtgctgagttgcaaagcgggaagcaaggacacgcagaactgtctctccgaggctgaaattaccgcattgcgtaaaatatacgaagggccgaaagacccgcaaagcggtcagaaactgattgtcggtggcccaatgccgggatcagaactggcgtggggcgcctcctttatacccgccacggccgatgcgcctaacttcagtaagacgatagcgctgaacaccctgcaatatctggcttatgtgaagaatccgtcgaaaaccctcacgctcaacgacgtgcagttcaataaagtcggcttgtccgagctggcgaaactgcatccactgtatgacgcgaccaacccagacctgaaagcgttctacgaggcgggcggcaagctgattctctggcacggctgggcggacggccatatttcaccggccaacacgctggcttatcatcaggcgttggcggacacgatgggtggcgcaacccgcgataagtttgagcgactgtatttgttccccggcatgcaccactgttcgggtggggaagggccaagccagatggacctccttagcccgatgatgaactgggtggagcagggaatcgccccgacgtcattatcagctatcaggcggcgcagaaggcaaccacccgcttcggccagccgggtggcgcgccgggcaaaggtgcaccgcaggctgtgccgccaagaagccaagggatcacgcttgaaacgctggctcaggggcggcttcgcgcccggtgtatccttatccgttttatgcggtctacagcggcaaaggcgacgttaattcggcggcaagctacaaacgtaaacgcctgaaaacggtgccgacccagtatccctggttgggtcaggacttctttaaaccctatcagtttattgaataagtaaactccccattgtcagtctcccgcgcctgttggcaggagactgacgttttcgcctaagcgtcatttcccgtcataaaaaggtcatctcgactcgctagcttatgccaatcactcattgcagagatgcagagcctcatgagctatttgtcacttcacaacatcagcaaggtttggggcagcaagactgcactcaatgacgtcagttttgaggttaaagagggggagttcgttgccttgctcgggccttccggctgcggaaagtccaccatgctacgcaccattgccggactggagtttgccgacaagggtgctattcacctccagcagcaagacgtgacgcggctaacgccgtcgcagcgcaaactgtcgatggtcttccagtcctatgcgctgtttcctcacctcaacgtgcgcgaaaacctgctttttggccttaaggcgcgtggggagaacaaacgtcagtttgcttcacgtctggaggaagttgcgaggctgatggagctggatacgctgcttgaccgactgccgtctcagctttcgggtgggcagcagcagcgcgtggcgctggggcgtgcggtcatcgccaataacaagctgtgtctgatggacgaaccgctgtctaatcttgatgccaagctgcgccagagcatgcgccgcgagatacgtgcgctgcagaagaaattgggcctgacccttatctacgttacccacgatcagaccgaggccatgagcatggccgacaagattatcctgctcaacgacggcagcatcgagcagcaggacacgcctgacaacctttataacaatcccgccaccgttttcgttgcccaatttattggcgcaccgccgatgaacattctgccgctgactcgcaaacaggcgcagcaccagttgggagacctgcgcgtgcccgttgtagaggattatgcgctttctgcgctgagcctcgggctgcgtgcggaggatattcagctctgtgcgccagacagtaccgaactgaaaggcaaagtgctgagctacgaatatatggggtccgacacgctggtggtgtgcaagattgcgcagtgccaggccacgctaacggtaaaaattccggggatgtgccctctcaacgaagggagcattgtcgggctacattggctgacatcggcacaatatttcttctctaccgccaacggcaaacgctgttatcccgtcgaagaaaacgtgctggcgatggaagaaaaactcgctgtttaagggcttatttttgattttacttttacttactgaagggaaaaccatgcctgtttcaatgcgcttatcacgtttggctgccgcggttctgctgctttctacgacctctgccttcgcggccgataccgttaaactgcaaatgtattatccgatagccgtcggcgggaaaatcagccataccgttgacggcctggttgccgatttcgagaaaactcatcctgaggtcagcattcagccggtttacaccggtgactatgcgaccacggtgactaaggcactgaccgcgtttcgtggaggcaatgcgccgcagatggcggtaatcggcgatattgaagcctattcattgattgacgccggtgccattgtgccggtgagcgacctggcgaatggcgcagcgggtaaggcatggattgacggattctacccggcctttattcgtcacattgacggcaaggtgtggagcattccgttccagcgttcaacggtggtgctgtactggaataaacaggcttttgagaaggcggggcttaacgccgacgccgcgcctaaaaattggcaggaagtggccgatttcggcaagaaactgaccgtgcgtgacggcaacgacgtcaaacaatggggcattgaaattccttcaacaccaaacggttactggaacttccagggtatcgcggcgaccaatggtgcacgtctggacaacggcaaaggcacggcggtcacctttaatacccctgccaccgttgaagcgctgcactggttgaccgatctggcgcagaaagatggcgtatcgccgaagggggccattgcctggggcaccacaccgcaggactttatcgacggcaagacggcaatgatggtcacgacgaccggcaacctgacgacggtgcatgacaacgctaaattcccgttcggcgtcgccatgctgcctgagaaaacccagcgcggcagcccgaccggcggcggcaatttgtatatcttcaaaaatggcactccagcgcagcaaaaagccgcactggaatttattcagtgggtctctgcgcctgaacaggccgctcgctggagcatcgcgaccggctatgtggcgacgtctccggccgcctgggagactgacatcatgaaaaattacgtgcagaaagtgcctcaggcgttagtcgcacgcgagcaactcaaatattcgcagccggagctctcaacctataacagcgtgcagattcaggagttgctcaaccacgccatcgaggcgtcggtcacgcagactaaatcacctgaagaagccctcgcctcggcacagaagcaggccgaccgtttgctaaagtcttatcaataagggcactgagatgagcacgctgcataccgttgccccgatagcccgcaacaaagggttgtctctcccgctctatggctatctgctgatacttcctgcgctggggttgttgctgctttttacccactatccggcgctggcaacggtttgggagagcgtgtttagcgcggctcgcggcggtcatccggcccactttgtcgggctggataactaccgcgcgctgctggacgatgacaccttcatgttatcgctgcgcaataatctgctttacgcggtcattaccattccgctggccgtcgggctggcactgatgatggcgctggcggtgaatcgccgcctgagaggcaatgccttggtccgcgccgcctttttcattccctcgttgctaccgatggtggctattgccaatctttggctgtttttttataccccgcagctggggctgcttaaccagctgttgtcatttttctcgctgccagcggtcaactggcttggcgaaccgggcaccgcgctctatagcctgatggtggtctcggtttggcgtgaggcgggatttttcatgattttttatctggcagcattacagcagattgacccgcgactggctgaagccgcggagatagaaggggcttcacgcgcctatttcttccgtcgtattcagtggccactgctgatgccgaccacgttgttcatcctgattaacgcctcgatgaatgcctttcgcatcgtcgaccaggtgattgccatgaccaacggcggcccggacaacagcaccagcctgctgctattttatatctatcgcacggcgtttagtttctgggacctgccgtcagcgtcggcaatgacggtggttttactggttattttgggcgctatcgccctaattaagttcaacctgctggacaagagggcgcattatcaatgagtttaacgatgacggtatctccggcgcgtcccttttcctacgctcgcctgtgtcttaatctggcaatttgttgtgcggcgctgctgtggtttttacctattctactgtcgctgtgggtggctatccacccagcctcggagcagggcagtttttcgctgttggcgcctttgaccatgcagaactttgtgcacgcctggcaggccgcacctttcggtcgctatttcctcaataccacgctgctggtgctgatgattgtagtgtgtcaactgattctggcgacaatggcggcctatgcgttggtgcgttttcgcctcaagggcgcggggattatattttcgctcattttgctgcagttgatgataagtcccgacgtgctgattctcaataactaccagactatcggcgcgctgggcctgcgcgacagcctgttaggcatcgcactgccttactttgcttcggcgtttgcaattttcctgctacgccagacgtttaaaagtattccgttggtgctcgaagaggcggcgatcgtcgaaggtgccagccggttttatatcctgcggcggatttatattccgctcgccaaaccgatatacattgcgttcgcgctggtttcgataagttttcactggaacgattttctgtggccgctggtcattaccgattcggttaaggttcgccctctgaccgtcgggcttcagctgttttctgcccctgaacagggcgtgcagtgggccttgataggtgccgccaccatcatgacatccttgccgctgttgctgctgtttctggtattccaacgtcagttcgtgcagtcattcatgcgcgccggcattcgctaagcaggagaacgattatgactatttcccttaccgccgaacagcgccagattctgggccacgtcgccgcactttatgaggtgcccgaactggcagaagtggcgcattccagcaccacgctgcgttttggactgatagcagacccgcagtacgccgacgccgagccgggcgtcagtcatcctcgtttttatcgcaacagcctgtgcaagctcgccaaggccattaccgagctcaacgatcatcgcctggagtttgtggtcacgttggggatttggttgaccgcgactggtcaagctttgcggccgtgctgcccgtttacgacgcgctgcgccatccgcatgcggtggttatcggcaatcacgacgcgcaggtgattactgaatatttggctgagcagacgccggtgcttgggttgcccaagagctattaccagtttagtcaaccgggataccgttttatcgtcatcgacggcaacgatctaagtctttattgcaatgaaggcaacggcgaggagcgccacaaagcgcaacaggctctgaatgaactgattgaccagcagagtccgcaggcgcagagctggaacggtgccgtgggcagccagcaacttgcctggatagagcaggccctgcaggaagctcaggctctacaggagaccgtgctggtcttcggtcattacccgctggcaccggaaaataaacacaatctctggaactgcgaccagctggttgatttgctgtgtcgctatggggttcgcgcttatttcgccggtcatgaccatgagggtaactatgtgcggataggcaagaccgactttatcacccttaaggggatggttgacggtgccgacaggttgccgtttgcgagggtcgagctcaaggccggcgagctgacggttaacggctatggtcctgaaatcagtcgcgttttgccgtcggagatacccacgaaggcatcatcaaccagctgacacgccaagtcgctgacgtcgggctcgaggcacaggtcgacgtcagcggcaaagccacgctcaattaactcttgcgcggaagcgcactcacgaagacggtcgagcggcgttgctcgatataccgccaccgcagcttctgcttcaggggacggcgttttgcccgccagatgcgcaatgatgccgcccgcggcgtgagatcctcaagcgacggacgtaaactcccgtcggtccatctctcgccgcacggcaccagcaaaatcctcgaaaagccaaggcaggcacgcgccgttgccttgaggtttctcaaactgccacagaatagggcggtggaggcagaagcgacggctttagccttgaaggtcgtcgccgagccgttgggtgaaggcaaaaccagtcggtttcctgcgctcagtttcagcagcgactgcggggagagtgtataccccggaccggaaaaacgacggtcaacatgggccgcttctgcgtctttttgccgcgcatattcctgcgcagtctggtccttccacggatagggaaacagcaaggcaccgcggtcgcaggcgatgctcacgcaggttgaaaatgacatcacgtcaataatcacaatgcaatccacctcgtgcgccaaattttcgacggcggcaataccccattcgaggcgcacctcatagccggattgtgaaaaatagctcactgatttctatcctcggtaatctttccagcgtcgagtttaatgattctgtcggccagatgagggggtaaagaccgaccaacactttcgccagcgtggttttcccgctgcccagtgaagcgttactaaagccactcagcaggctggtgaacatggcgacgaaaagcagtccatgggcatttcgcacaagatacattaacatttttattgaagctgtcttgctctacggcttttttatgcccaacaccggtctatcttaatctcctcgggtttgccgtcatccccgtcaatgtccgtttagcactattttcccctttacaaccagttttgccacattttgtccgaatcaagccgttttatcgtttcaccgttacactagggcagcaacaggctaaactttacttattacgcgaagacgtatttgtattgctgccaacaggcaagactttcaaggcattagcgcttctttgatttcttgaaaaaatatcattccacacccctcaagctgcttgcttactgagcaaattagttgtacaaaattaatgcgtgatctgtatcacgtttgtcacgcaagacctcatagcaactgtgatctgtcctatactttaagaagggcatcaattggcgctgtctctgaaattaggcgcgtagatggcccctcaaaattgtgtgttccaaatgttttttgcatcaggcgaaaaagggttgtaacgacatttaatcaattgctaggaggaggagaaataatgtctgaataccattatttgcttctgggcggcagccgccatggacaaaaacatgtcgatgaaaatcaccagttttccctgttctttcgcggagataactcaggcgaactcgctcaggcaaaagcagagctctatggcgtgcaaaacgaacgctataaagtctgtccagaaaaatgtgcggatgggcactggtatctgattggctattgcggtgcttgtcctgacattccgctggatgagaagacgaacttgttaattcacaagaacatcaagccaatgatgtaaagtctttgacaacgttgtacgcactaagccaaacctcgcacctgcggggtttgttgctttataaaactcatttcattgatcctcgccgcaatgtgggtattatattcgggtactaaaaaacgacccaagtaatattggccctataaacccctctaaaaatttaaattttattaaatattatcctgccggtttttttgttttggcagggtgcactcccgtgggttggaaattatcatgaatttaaagaaaataaagaaaataaagaaaataaagaaaataaagaagatgaacatggctaggctggcttttcaaaagagatggaagattagagtggcttcgcagttttttgatttcctgataattaaacaagatttatttaaccctcaggccgttaaaactattttaatattacgtgaagacaacaagattggcgattccattgttgccagtggtttgatcaaggcgctagagcgcgcgggttatgctgtcgatgttgtgacaggcaaggataacgcttttatttatcaggcagcgtcttttgcaggaaaggttttttcacactccagcaagaaaagcagcgtattgaaaacggtgtgcaggttacgccgccaacaatacgatctgttgcttgattttggtgatgatatatcggcttcacattatgcgtttgtcagtcttattaatgcaaaatacactttagggtttaacaaggaggtatttaaacgctataacgtcaatattccctatgcgttttacgacagacacgtaagcgaaagatataagacggtgctgcaaaagcttgggctcagcgcagaaaattatcgctacgagataacgattccggacatcgtagccaacgcggtgacgatgtttatggcccctcttttgccaggaaaactgattgttatcaatccatttgcggcctgcaaaacgcgactgatgtccgaccatcagcttggctatgttatcgagaaaattaagcaggtgactcctgatgcagtgattattattatcggccctcctgcattaatggagtcactgaagctcgacgctcgggcaattaagagtccgtttacgagcttcttgagtgcggcggcaatagtcaagcaggcggacctgattattacgccagacacctcttgggtgcaccttgcctgtagttatcagaagccacttattgcactttatgccaacgcgatattagaaggtggctttattaataataaagtctgggcgcctaattatgcgcaggcgacacagattattactcaagagaaaaacatatcatccatagacaacaaaaaaataggtgtggagattgaacgctacatgctggcaccttgagtatgaaattaatgaaagcgtttgttattagccttaaaaaagaccttgagaaaagaacggcactattgacgcagtgccaaaagatcgggcttgaaaccgtgattttttatgccgttgatggcgctacgctaagcgaggaatttatttcacgaagcgttgataattattttgccatgggcgctaattgtgaaagatgatgcgcttatcgatgctaatataatcgatgttttaaaacggattgaatcggtaagtgataataaagccagggtttatctgttaactcctccagaatattattgtccgacaaaaaaggcctctctcggtaattacgtcacattttatcgcgtcagcgaggcatgttctacggcaggatatggtgtgacacagcaggctgcgaaggcgttaattcacatcaatacgccccttcgttgggaggcagactgcgggggaatgtttaatctgctttatggtctcgagatcttgagcctaataccacccgccatcactgacggcgataccgacaaggaaggctcgggactggagcagtagcgagctgtcagggccgtcgaaagggcggcaattcgctgtcgacttaagagacaggagaaaggttacccgttcagaagagcacgtcgggtattgcgcaagaagtttcagaaggaattgagctacgaggttgaataacgagcgggaataactctgcctccaggtcgtaacgcgaggcagagcatcaaaaggttacgcggtaactttttcctgagtttttgcctgattcctggcgaactggttctctggctcgcgcaatcccagattctcacgcagcgtgttgccttcgtattcggtgcggtaaaggccacgctgttgcaaaatcggaatcacctgttcgatgaaatcatcaaatgccgttggcgtgccgccgcggacgatgaatccgtcggtcgcaccggaggtaaaccagtgctcgaagccatcggcaacgtcttgggccgtgccgaggaacgaagggcgcggtgtggcggcttcgagtgcggcctgacgcagcgttagcccacgcgcttttgcattgcgcttaatctcgtcggtggtgctacggaagctgttctgccctaagtcgccgatttccgggaacggcgcatccagctcatgctggctgaaatcatagtgttcaaagtagcgtccgagatactcgagcgccttgtcaacggtcaccaactgcgcggtctgctgatacttgccctcggcgtcctccacgctgtcaccaataatcacgctagtcccctggaacacgcggatatcatcggcgtcgcgacctttctcaaccaactgacgtttcacgtcctgcaggaattcacgggcaagctccggcgtttcctgacgggtataaatggcatcggcggcctcggcggcaaaggctttaccctgctcggatgcacccgcctggaagacgatagggcgaccctgaggagaacggccaacgttaagcggtccctgtacagagtagtatttaccgtggtgatttagggtatgcagcttgtcgcggtcgaagaattgtccgctttctttgttacgcacaaaggcgtctttttcccatgagtcccacaggcctttggtcacctgtaaatattcgctggcgatacgatagcgctcgtcgtgctcagggtgtttatcgcgggaaaagttcttcgccgaaccttcaagcggtgaggtcaccacgttccacccggcacggccgccgctcagatgatcgagactggcgaactgtctcgccacggtaaagggttcgctataagaggtcgaaagcgtcccgaccagaccaatcttcttggtcactagcgacagcgcggagagcagggtaataggctcaaagcggttgaggaagtgtgggattgactgctctgtgatatacaggccatcggccacaaacagaaaatcaaacttggcctgctcggctttcttcgccaatgcctgaacgaactcaacgttgatgctggcgtcggccaccgcgtcaggatgacgccatgccgacatattgcccgaaggtccctgaataatcgcgcctaagcgtaactgtctttttttgctcattattttttcctttatgctgaccggttataccaaaactcgcgtgtcggcgatggtgcgaacgtattctttctgctcctgcgcctcatagatttcttgattaagaatcttgcgcagatacaccaactcaacgccaagcgggttgatggcggtatgaaacgcctcatagcctcggcgctgatacagcgtggtgagccacggatggcgtatcgccgtcgccagaaaaaccgccggcgctttcagctggtcgcgcaggaaggtctcttcggcgtagctgataatcttcgcgccatagcctttgcctttggcgcgttcgttcaccgcaaaccagtgcagaaacggccagggtgcctcaggcttcttcggcggtgtccagggcagtcgtaccgtagccgttgcggttattcccagctccgtttccaacaggaaagtgctttcgttgcggataacctcgcgcacgtcctcaacgctggcgcgagtaatcgtaaaatgaatattgtgctcttgcagagaggcataggccttttgcagcatactgtgcagcgcttcggcgtctgactcattggcctggcgaataatttcactcattagcggctccctatgccaaagccacgctggcgctggcgagtaattcgagcgagcgcagacgggcctgagactgagaaaccggtgaatcgatcacaaactcctcaataccatactgcgcctgcaatgcctcgagctgctgatggacctcttcaccggtaccggccagcactgccgatttgcgttcctcaatcttgtgcgacgcggccttcgactggcgaatataggcctcggcctgctccagactgccgacgttgacccgttggccgtcgctggcgatgacgcgataaagctggccttcgccgacccacttcttagcctgtgcgctggtgtcggccgcaatcaccggcacggctagcagagcgcgacggccgctgctgtcgtgggtataggcagaaagtgcacgggaaatatcacgctcgtcggcgttgaggtgcgcggcaaacacgaagttccagcccagtcgtgcagcaagtctcgcgctctcttcgctggcacccagcaggaagcgcgaggcggtctgtggaggttgaggtgtaacggaaagcgtgtcaccgctctgctctctgaccggcacggaaagccagtcgtccagcagttttagctgttctgcgaagtcacctttcaactcgggattgaccgcgtactgtaacgcatgcgttgacagcggcaggcccccggcgctttgccgacgccaaggtcgacgcggcctggcgccagtgacgccagctggttaaagttttcggcgaccttaaacgggctgtagtgttgcagcattacgccgcccgaaccgacccgcagtttgcgggtgtgagcaaggatccacgcaatgacaatttccggtgaggagatagcaagcttgtcggtattgtgatgctcggccagccaaaaacggtgataaccccactgttcggccttttgtgccagttccagcgtgcgcttgagtgccccggcagcatcctcatgttcgtcaagagggcttttgtccaacaaacttaaacggtatcccatctttttttccttatattaagctcagagggtaatgcttttgattattggattcggggggttgcgaagtaaaacaacaatagttgctatgaagttgcgctaattgaaatagcgagtaagggggcggtttgcggatgaaattaaataggataaagttgcggacctgcacgttaacaataagtcatccgacggaaaaatatgtctgaatccttgaacgatgagagtctgaacgccttcaaccagcggctgttttcgctggcgcagacgctaaaaattgacgcctgggtgcctgaaaatcaggtgatggaccgcgtggcgttaagctttcgcaagttgctgaattttcttgctcaacacccgagtgaaacccagcagacgctgctggtatttcctgcggtgcataaaacgcgcgatgagctggtggcgattgtgcagggcatttttgccgaagcgcagcaaaacggcgtgtttagagaagatatttccgtcgcgctgctggcacagtttttcaccgccatgctgctgcaaatggtgcaaattcccgccgaccctgcgggacgacatcagcagagcctggccgctgcgcgactgttttgcaaaggggcatggctcggtgaagattttgcttcgcctgaagattaaagatgcggcccaggtccgctagagtcacgcacgataagctcgccggggaacggctggagggcatcgaacggtcggccgtccatcatatcgactagctgtttgagcgtggtttcaatcatttctgcgaccggtacgcgaacggtgctgagcgccgggatgaaatacgacgccatcttgatatcatcaaagccaatcaatgagacatcgtgcggcacccgttttcccaccgcgtgcagctgattggccgcaccgatcgccatatcatcattactcgccaccagtgcgctaaaagagatgttgcgcgcgagcaacgtttttgccgcttcgcgcccgctctccagcgaccagcttcctgcaacaacccagggttctcgatacgcaatgtcatgtttctccagcgcctgacgatagccccgcaggcggctgtctgcagacggcgaaccgggtataccgctgataaaggcgatatcgcgatgcccgcactgaataagatggctgacggcgttaaagctgtactgctggtggtcggcgtacacacagtgctgcgggctatgttcaagtcggcgattgaccacaatcatcggtttcgaagagcgttcgatgatttgagtcagttcgcctgaatttaagaaacggggataaacaatgatgccgtcacagcgtaaatcgagcagaaattcgatcgcctgacgctcctcttcggcgctgtgtttgccgtcggcgaggatcagctgacgaccataactttcggtcagcgtcgccgtctggaagagaagttcggtgaagtaggggccattatagagcgtattactgaccatcagtccgatgctctgcgatttgctggttgccaggtttctggcgaccagattagggcgataaccgatttcttctaccgccttgaaaacgcgatcgcgggtcgttttgcttacatagctgttgccggccaaaacgcgtgaaacggtagccttggacactccggccttattggcaacatcaagcatggtcttcattttcttccccgtaacggcatttcgcagtggactatcgtaccttgttatttattgaactaacaagttattcgaagagagcgactttacgcaatggcaataaataacccgcatttataggtgacgataactatttatatcttctgttattattagccgtgttttaacgttttccttacgtttaataatattcccactgcgatattaatccatctggttggcattaatatttaacgattgcttcccgcgtgcgatcgccatcacaaatcaagctaagtaatctgaaaccggttgcagaaacggcgttgccttgtatattttgatttaaacactacgccgagggataaaaaatgaataagatcttactgtgctgtgccgccggaatgtccaccagtatgcttgtccagcgcatggaaaaatatgctgcgcaaaataatatcgacgttgagattaacgccattggttttgatgagtttagtgaacagattcagaattatgactgctgtctattggggccgcagatcaagtacaaactggctgaattcaagcaggtttgtgactcgttgaacaagccgattaccgtcatcaacaccatggactacggcatgatgaacggcgaaaaaatcctcaacgaaacgctgaaaatgatcacctcagatgaggcaaaataatgagcacactcagtgagtcattattcagcgtgattgagaacaggattagccctattgcggcgaaactgtcgagtcagcgccacgttgtcgccatcaaagacggctttatctcctccatgccgttcctgatagtcggctcatttatgctgctgttcgcccatccgccgtttagtgccaacagccagtgggcctttgcccagtggtggcttggcatggtcgcccagcacaccgaccaaatcatgatgccctacaatatgaccatgggcatcatggcagtctatattgccgccgctatctcctacaatctggcaataagctacaagatgaacggctttatggcggctatgctgtcgttaatggcgtttctggtggttgcctcgccgcaaaataatgggtcgctgccggtcgggtcactcggtggggaagggatatttaccgccattcttgtcagcctttattccaccgaattaatgcacttcctgcaaaagcataatattggctttacattacccgagcaggtgccgccaaaaataaggcagtcatttgacttgttaattcctattcttgcaatatttattaccctgttcccactaagcctttttattcagcatcagtttggcctgttattaccgcaggcgataatgtcaatttttgcgccgattatttccgcttcagattcattacccgcgattttaattgccgtgctgttgtgtcatctgctgtggtttgctggtattcacggcgccgttatcgtcgggggaatattgcaggccttttggctcaccaacctgggcattaaccagcaggagctcaatgccggtcaaccgctgacccaaatcttcatcgaacccttctggcagttctttatcgtggtaggtggctcgggttcaaccatggggctggtattcctctacctgcgcagcaagtcagcgcatctccgctcgattggcaagctggggctggtgccaagcatgttcaatatcaacgaaccggtaatttttggttcaccggtagtgatgaatccgctgctgtttattccgttcattaccgcgccgctggttaatgcggtcattgcctacacggcgacgcgcaccagtctggtgaaccacgtggtgtcgctcgcccctggaccacgccagggccaataggcgccgcctggtctacgggttggattatcgggcgattattctggtcggcgtgcttatttgtgtctcgacgcttatctactacccgttcttcaaaatgtatgaaaaacagctgcttgagcaggaagagcccagtctgcaaccggtggagaataactgattatggaacttgaaaacgtcgttatggaactgattattcatgccggagaagcacgttcctgttcgatggaggcgctgagtgcggcgagaaaaggcgactggccgctggctgatcagcatctcaccgaagccaaggctgcggcacgcgaggcgcatctgattcagacccagcttatcggtgccgatgagggcgcgggcaagatcccggtcagcctgatactggttcacgcacaggaccatctgatgaacgccatgctctgtcgcgacctggtcgaagagctgatttatttgcatcgcgaagtttctgcattgaagaatcattaatcaaggagagcgtcatgaaacatcaacgtatcaagcctttcccacagggttttctctgggggcatcgacctcggcctatcaggtcgagggtgcctggaacgaagacggcaaaggcccgtcggtgatagataaggcgatttttgatgccgaactcagcgatttcaaggtcaccagcgaccactatcatcacctcgaacaggacgtggcgctgttcgccgaactgggtctgaagacctaccgtttttccatttcatgggcacgactctttcctcagggcaacggtgagattaaccctaaaggggcggcgttttaccagcgcctgattgacctgctttgccagcacaagatagagccgctggtcacgctgtaccattttgatttgccgtgggccttgcaggagaagggcggttggtctaatcgtgaaacgatagatgccttcgagcgttattcccgcacggcttttgagctctatggggatagggtcaattactggctgactatcaacgaacaaaacatgatgatcctcaaaggcgaggtaataggcacgttgccgccggggacgcctgacccgcagaaggtgttgtatcagcagaaccaccatatgatgctggcgcaggctaaagcgatgatagcctgccacgagatgctgccgcacgccaagattggtccagcgcccaatatttcctgcgtttaccctgccagcgcacgacccgaagacgtgttggccgccaacaacttcagcgcaattcgcaactggctgtaccttgatctggggtgctatggcgtttataacgcggtggcctggagctttatggaagaaaaaggctatttgccgcagataaccgacgaagaaatggcgttactgcgccgaggtaagccggactttatcgcctttaactattacgcctcggccacggtgggggctgacaagtccaccaatgttcgcgagcacggcgagccgtccaaagccgtcgaccagcagttggccggtatcgacaccagcgtttacgccggtatgaacaacccttatctgaagagaaaccagtttaactggtatatcgaccctgtcggttttcgcattacggctcgtgaaatctatgaacgctatcgtctgccgatgatcgttactgaaaatggcctcggcgcgttcgacaagcttgaggcgggcaataaggtctacgacgactatcgcattcactacctgcgccagcatcttgaacagctgcaactggcggtcagcgacggtgtcgagatgttcggctattgtccgtggtcagcgattgacctggtcagcacccatcaggggattggcaaacgctacggctttatttacgtcaatcgtgatgaaaaagaccttaaagatctcgcgcgcttcaaaaagaaaagttttgtctggtatcagcacgttatccagtctaatggcgctaatcttgacccacaggtcaagtattaatccccgccaaaactcttacaattttgagcaaatactgaggaaaaaatatgtctaccagacaattgccggatgattttctgtggggtggcgccgtggccgctcatcaggttgaaggcggatgggataagggcggcaaggggccgagcatcgttgatgtactaaccgccggtgcgcacggcgtgcagcgtgaaataaccgacggtgtcaaaacagggttcagctatccgaatcatcaggcggtggagttttattcacactataaagacgatatcgcgctctttgccgagatgggatttaaatgttttcgtacctctatcgcctggtcgcgcattttccccaacggcgatgagcagcagcctaacgaggcggggcttaagttctacgacgacctgtttgacgagttactcaagcataatattgagccggtgataaccctatcgcactttgagatgccatatcatctggttaaagaatacggcggttggttgaatcgtaaggtggtcgatttcttcgtccatttcagcaacgtggtgatggagcgctacaagggcaaggtcaaatattggatgaccttcaatgaaatcaacaaccagcgcaactggaagctccccttgttcgggtattcctgctccggggtgattttcatcgaacagccgaatccagaacaagcgatgtatcaggtattgcatcaccagtttgtggcgagtgccagagtggtaaaagacggtcatgcgattaaccctgactttaaaatcggctgcatgctggcaatggtgccgatttatccgtggtcgtgcgaccctgatgacgtgatgtttgcgcaggaacagatgcgccagcgctatctttttggcgacgtgcagatgcgtggctactatccttcctacattctcaaagagtgggaaagcaaaggctactccattgaaatgcatccagaagacgccaagacgctgcgcgaaggctgcaccgattatctcggtttcagctattacatgagcacggcggtacagtacgcggccagatttgaagaggttggcatggtctccgtagaagggggaaaacgcaatccccacgtcgcggcttccgaatggggttggcaaattgatccggtgggtctgcgctacaccctcaacgcgctgtatgagcgttatcaaaagccgttattcatcgtcgaaaatggttttggcgcagtggatacgccagaggccgacggcactatcaacgacgactaccgcattgattatctgcgggctcatatcgaagagatgaaaaaagcggtgattgacgacggcgttgacctgatgggctacacgccctggggttgcattgactgtgtgtcctacacgaccggccagtacagcaagcgctacgggtttatctatgttgataagcatgatgataattccggcacccttaaacgttcaaagaaaaagagcttcgactggtataaaggcgtgatcgccagcggcggcagagatttatagtcttgctgacaaacctttacctccgccagatgtaaaaatccataagaactgtacgactttcataaattacgattcacctgatgaaatatagttttgaataattattcttaactattcatcaggtaatcgtatggcgcccctcgttaatctatcttcaacccatctcctccttcgtctctcgatcctgagagccaggccaaatgctccagcccgatgaaagcgaaagaggcgggaatttttatttcaaaggaagagcgagccaaccttgacagcctggtggagaaaatcagcaatgacggaaactggcagagtgataaaagcgtgtgcgaactgcttgttctggttgttaacgatgaggatttcctacgagccttaaaggacaccgtttttaaactcaaaaaagatgtcaacgtgaccgctgatgagacggcggataagcacagcctgctcagtgccctgctggaagaacctgctaacccgacgccggttgaaacggcagattttctaaggcttatcaaaggcgaactcgccactcaccccgataaatgggcgaacacactgtcgacgtttactcaggcgactgcgaagttcagtgaaacaatgaccgacgaactccctgccttcaaaatgtttcataaaaaaggccatagcccggagaaaccgacgttggtcctggatgttttgaaccgccttccggcggacctcgacgcgctgcaaaagacaatgccgcctcagtatcaatacaccctaaagaaattgcaggaggtgacgcagaatttacttcgggaggtgcaggattctccgcaggtgctaaccaggcaatccgacgttattgaagcgcataggaccagccagtcggtcaaccagctaaacgcgatcgtgaccgccctggtcaaaaccgttgacgccattgaactggctgccaggctccaggaccctgaaaacgcggcgaagatcgacaaggcacaggtggccacgttggttgaaggggcagtagatttaatgctgggtgagggtaaggcgaccgcgtcagacgcggcgctggaccaactcaggcgcgaggtggaaaagacgttgctggagaaggcctcaccggaactgaaagcgctggtgaatacggtgaaacgtcagtcgctcgataaccacacgcggtcaatgatggcggtgctgaaggaaactgccaaagggataaagacagcggccaaggctgcagatgcgtataccaaaaccatgccgggtaacttatttaacaccgaacccaaggagatccgtcagcaatttggaaagctggcaccgcatatcttcattgctggccacatcggtaatgcggctgacgagctgaaggcgattgccgccgaattaaccagggtcgccacgcctgagagtttcctgcataaggctaataccgtggtgcagacgggtttagaaaaatttagcctgaaacagatagagaagttcccaaattatgttcaaaaaaagctacagaatgttaaagctgctgctcaacaccagatagataaccttcaggcttctgcgctacgcggagttagggtactggactctatggttgacgataaacgggttgtcgagcagcccataggtcgcgttgtcatcccaaaacgcgtggccacagggccgagcaacgcggagttacaggggatcggactcatcaagatgctgcgtggagatatagcgaaacccgtagtctgccaatttaaggcgccccggtcacgcttttggccgatgcacagaagtttctcgacgccgtcgacgggttgcagtcggctgcggaaacctatgcgtcggccagcaaaaaatcacctcacattgaggaacccaaggcagggccggttggtgatatagagaaggcacttgaggcggtagcaaaaacgctgcttgaagagattaatccctcacatatcaagcgggttaatcgcgcgcaggaaaaatcccaggcgctggacgcctataggcaggctgcggagtcggcccaccgcgttgccactcaaatagaaacgacgctggtgagcacccttcgaaaggggctagaaagtctcgatctgccgcgcagtcaaggtgaggataaacagatccgtcaactgtcacaggtcttgcttttggcatcattagaactggttgatgctgcgaccctgttaaaaggggcgacgaagccgtctgaaaatggcgatatcaagactcagttaaagaccttgtctgaggtaaaagaaacaattgaagccattaatgcgaagattaaaaaggcggctaaaaaccaccttggtgagaacatacaccgtcattctcgcgatggccgcctggcgaaaggggtcggcatgtggagcaaggatcagctggaagccttcgccagtgagcaccccaatgccgaccctgcggtcatcaaaatagcgatgacgaaaattttcaaagacgttgctgaaaagaattttgcgaaagtcagcgaccccgaaggcaggttcctgcaagaaagagtggcactagcgataaacgatgcgtttgatgggaacatgtcactgccgcccgatcaacaacaactgctggcgaaaagcgacacctttgatcggtacctggtcaagtgggtggcaaaaaaatcagttcacgtggggtttacgcggtggtcactgcggcggtgggactgggtgacgtgacgctgaatcggatgatttcctttcatcctaacaggcagttgctgatgccgcgaatgggctatattaaggcgctgttagcgcctgtcacgattggcttaggggtgagagccctgaaaaattgtcttttgccggggcagggctcggctgatgccgcgattaaaacctatctggaacgtgaaattcctaatgccgttgcccgccttgtcaccggcctgctcccggccggagctagcctggcgcttgccgcgccgttggccggtttcgggctgtatcagaaggaccgaatgcagttccttgccagtgcggtaaagcggttcggcacggacagctccttcgcctcagtctctgcggtagcaatcgccacgcagaacaggctgtcggcaggtaaggtaccggcgccgaaagccccgctggcggcgacccgcagtgaacgcattgcctctgagcgtgaagcgcttcaggagaatgtgcttacgcgcggcaaacgctcgacgggcactgccgggggaatgcaacaggatgacttaaacgtcaaagctagcctggatgaggcgctgctggacaaaaatcctctttatcagcaaaaccgcctcgacagcccgctgctgtgggcgaaaaaccacctcgaggacaagctgcgtaacgcggggtatcaacgaactatcgattgggatactaaagttaaggtctatagcatcccgttttcagccgcctccgacagattggcagacgaaaggcatcagcaacggcctaaacttctggaaaccattagtctgctggattatgcctttaagacctatgcgcgtaaggactatgccagtttagggaatgagttgaaatttgaagctgaaaaagatgggatgcaaagagctgtgcatattctcaaaaatgaagatgtgcaaaaggcttatattgatgagttaaaaaggttttatcaacgtccggaaataaaagatctttcagaaaaatatatagtttcaagaatgagaagcatcgtcaatactcatttcgacaactcggtaggccgtagcgctttaagcaaaaatgaggtactggagcaaattagccgcggtgaggttgagttgctcgagcttgacggcaaatacgtcaccgacatggcctgtatcaagaaacctggcggtgaggttttatatctctctctgaccagtgggcaaggttttgaggcgcaatggagcacggcggggctaaagtttaaagataaggcaacaggagatgagttcttcaagcaggtgaaaaaaggattaaaacgggatgatttcatgagagcaaaggatgtggtggttgatgctagcggcctgttaccgtccccaaaaaaaattatcccaaaatcaaaaatgcggattatgatcggggaccggcacctatacccgttaacattaatccccctcccagacttaccacattgacttcaagtaagggtatgccagcgcgctacttaacttaaaaattcaccacgcccagcaagatgccgactacctgatgaagtccgataatgaaattctgggtgacgatattgttaacgctatcggtactctggggactgctgcggccctgtttgccatgccgtttaccggcggtgcaagcggcgttgctgtcacgctatcaggtaaagcgctggcatttcttgggacggcatcggcaagctggtcattgacacttgccaccggcgtggtgccgaaactgcttcaggccgccatggctgacaggcaggaagaagcccgcaatgcgatgattgatgctgctgtggggataatatcagaggcgggtgggcaagctgccggtgaattgctgagccgttcgttatccctcctcgctggaaagatgaatattaccgttgaccaattgcccgctgagcttaaaaccagaatggaaaatttcatcgactcgaaaatcaaaaaggcagacagtcatttttcggattctggatcaactctttcaaccagctctgtttcctcgggacaaggagcctaaacggcaccacggattcgggtattgccagcggttccaggagctctggcactggcaacagttcagagagagtgagtcatgccagcagttcgggcgattcaggctataacgatttcaagtttatcgatgatgtcgacgatcttcccaccacgccgttggatatttccgaccttaaaaccaccttgaatactgagtttgacgctaaaacggaggtcttcaaagcccgattcggcaagcgagagaatgctctcgagaatgaatccaattaccggaccctcgcctttgaagcccgaaagctggggtataacgttgacgtcggctatgtgcacgcggtccgtgaaaatgcctcaacccagcctgcgttgatcgttaaagtgtcaaaacccggaacagaagaccaatacatttacttcaaaagcaggacaatcagcacgactgatacaccaggcaccaccttcggtgaaaaagaggctgccaaggcgttcgacgccaataatttcaataaaaattatatcgcggacatggaatttaccgataacgcggtacaaatcgactggcataaaaatttcagcatgctggatcagaccttctcgagcaccctccttatgctgccaggcacgcctcgtcatttacagaaatcagccatcgccccgactggtatagagcgcagcagcttgatgagtccttaacccattttggtcgtcgtagttcaatgcctaacgatgctgtttcccatcggtcaggctctcgacgcggaggtgaaaggaaaatcgacgcttcagcgctgcaatactgggacaataaggcacggatgcgaagcggagtggaaggggtgatcattagctgggctgctaatcgcagcgtaaacaagggagcggcggcatggaaaagtgcactcggcagtacggcggaacaaccttattcacttgccgaaatatcggctaatgttgataggctgggcagcggtatacgttataaaaataccccgtcgggcaccctggtggtaggtgtctcactgaattcgatggtgcaggagggggaaagcaccaatgtcaatatcatgggctacagagtgcgaactattggcaaccgtaccccgaacgacaagctccatgcttatggccatactcaggtcaatgaagccgcagagtctgcaacctttacggctaaacatcttaactatacgcgggcgcgggagaaggtggctaatggcacctggagtgaagcagaccgcgcgatgaatgcccgatatagcgcaataaaggctaaattaggcgacacggtggatatatcgacactgaatattcccgttgtgctagtgcttgataagttgaaaattcccggttacgttgaagggcagcccataccgggcgtgatacccgtgacgctatcgtcggtgcgatcagcgacggtggagacgttgatgctgtggccaacgtgatggagaaattgctgaataaacgcattccggtcagccatgcaggcattgaagaaacgccggagtcgatagctaaaagagagataaccaccgatttaaaacaaacgagagatatcagcacaatgcctcaggctgaaaaatggattgcagacaaaataaaattaaagggtgaaggtgtcacaataaaatatccaccaaatattattcgagctctgcaaaatcatttagagccaaagctgcttcccatgattaacgaggcaaggaacgatattaagactgcgctgccagcgaggctccaattctttctagaacaatttcagcccataaaggattttctcaatacgtgtactcaaggtgctgactcactggcatcaggcaacgtcgaagcgcccactgcgcggttgtctaaaagcgatttaatacatttatacactctattgatggctgaaggtatatctacaaaagaggatgcatattattttctcgaaagtatggaaaaaaatatgatgcaggtcggggatcggctgggctcgagaaggttgcctcaaaatttaatcgatttcttaagcacaaaaacaccggactttactctttttctcacccccttggtgaaaccgttggcagtaaaccaggagaatattctgtcaaacttgcagatatccagcgtcttaaaagcatgcttgaacccgctgttagtcacgttgccgaggcacagagctggcttgaaacccatgcagcttcaatgggagagtatgaccaaatacagctgccgcgcaatgttatcagggttgtgcaaggaagtgatgtcgacattaacagcattctggcattgcgtggggtaaggtcgccaaccgcgggcaaattagttgataaggaactgctggagatgcttattgatatactcgagaacaataacaaatccgaggtgctgaagaataacgatgacgcccacagactgctgttgcaaataaaaaataatatagcgaacggtaaagctggcgcagggactttaccagtaaaactaatccgatatatggaaagtcagaacgttaaggttagtgagtttttggttaaacatggcgatcttagtttggctattggcctagctgaaaaacgcggtgttgctccagcgctggccgcaagccatatgcaggctgagcacattatggtcaatgaattgcaggttcagcaattaattgacctgcttgctcaaagtacctaaacaatcgtggctatttaacatcttagattgaggtcatgcaatatatgatgttaaatgagaaaaaatggcaatcgcgctcaggagttattatggataatcaaccctctacaatttatctcaacgcctcggaggctatcgctcgccttgagtcgctgtttgaggcctccctgtcggcgctgcgcgccgccatcagccaatatatcgataacgggactttgccagacgcggcggctcgcgcaaacggactctttgcctacccgcagatcgaggtcagctgggacggcagttcacaaactcagttccgcacgcgcgcctacggacgtttcgcgcatccgggccgttacgtgaccaccattgcccgccccgagctgtttagggggtatttgctcagccagctttcgattctcgaaaaagactacggcgcatcctttattgtcagtgcgtcagagcaggagatgccttacccgttcgtgattgacggttctgacctggtgctggaccgctcgatgacggccggtctggcgctgaatttcccgaccaccgatctggctaaaattggtgacgacatcaccgacggtgtcccgagcggaaccgacagcttcccactctcacactttgatgcgctccgcaccgacttctcgctggcgcgcctgaaacactacacgggcacgccgcccgagcatttccagccttacgtgttgttcactaactacactcgctatgtggacgagttcgtcagctggtcatgcgagcagattctggacccaacctcgccttacaaagcgctgtcctgtgccggaggaaactacatcaccgaggaagacagcgatccgtcgcgcaccgcctccgatttggcgtggaagaaacaccagatgccggcctatcacctgattgctgaaaacgggcaggggatcacgctggtgaacatcggagtggggccttccaacgctaaaaccatctgtgaccatcttgcggtactgcgcccacacgcctggttgatgattggccactgtggcggactgcgtgaaagccagagcattggcgactacgtgcttgcccatgcttatctgcgcgacgaccacgtgctcgatgcggtgttgccaccggatatcccgatcccaagcattgccgaggtgcagcgcgcgctgtatgacgccaccaagctggtcagcaacatgccgggtgaagaggtcaaacagcgcttgcgtaccggcaccgtcgtcaccaccgatgaccgcaactgggagctgcgtttctcggcgtcggcgcgtcgttttagcctaagtcgtgcggtggccgtggatatggagagcgccaccattgccgcccagggttatcgcttccgcgttccttacggcacgctgttgtgcgtttctgataaaccgctgcacggcgagattaagctgccggggcaggcgaaccacttctatgagggagctatctccgaacacctgcaaatcgggattcgagcgatagacctgctgcgcgccgaaggggacaaactgcattcccgtaaactgcgcaccttcgacgagccgccgttccgctaacccagcgcagcggacgcttagaataaaaagtttgagtctacaagaatgttgactctacgacgggcggcggagaaaggatctctgccgcctgataccgtcgtaagtcattccctgacctcatttccctttctcaaaaatcgcatttctttagcacaaaattggatttacttatctaatttaagcagttgtaaggcttaggccgacccctgaaaataaataatattgatctattttaattttcaccgggaaaaaggtttaaaaatgaagttattaaaaaaattgctgcttcctctcgtgattgcggcaagcacgcagagcgtttgggctgccgatcagaacgtgcctttctctagttctctccacgtttccgccgatagcgccttaaaaagtaagctgcctgaagacattcttaagcgcggctacatcgttgcaggcactaacccaatactccgccaaccaccttttatatggccgacaataaaacgctggctggccgcgagattgacgtgatgagtgcaatcgccgaaaggctcggcgtggcggtgcagtggcgcgataccggcggtttcgacaatattattcccggcctgaagtccggccgttacgacgttgcgctgtccaacatcaacgctaccaaggcacgtctgagtcaggttgatttcatcggctatttcgatgcatcgcgtctcggcattatctcgcgtaaagacgaaaacattgccccgtttacttcactgcaggacgtctgcggcaagcaggtcggtgccggtgcagggaccacacagctgctgcgcctgcaggaggctacccagaaatgtgtcgccgacggcaaacctggcatcacgattgcgaccttcccggatcgtccggcgggcgtgcaagcggtggtcagcggtcgtgtggcgatgttctttggtccttacgaaggcttgacgtatcaggtcagcaaggtcccggtgctcaccatgagcggacagattacggttaacgacgctccggtttctattgcatttcctaaaggttctccgctggaagacgccgtgcaggccgcgttgaactcacttatcaaggacggtagctaccagaagatcctcgataagtggaacatcggctacggcgcgatgaaagaagcaaaacgcaacgaagagattttttaatgcaaaaggcaacgccagaatcgcaggacgagctgcgtattatcggtaaaaaatactatgggcgctggatcagcgccttcatcgtattgctcattttactggcagtagcaaactcggtcatcaataacccgcgctttgaatggaaggttattgctgaaaatctgaccgaagcgtcaattcttcagggcgtgttgatgacgcttcagctcacggtaatttccgtggtgcttggcttcgcgggggcacggtgctggcgctgatgcgtctgtcgtcgaacccggtgctttccgcggtgagctggggttacacctggttctttcgcggtgtaccgatgctggtgcagctgttcctgtggtacaacgttgccgcgctttatccaaaaattacgctgtctctgcctttcgtcggtgagctgtggagcgctaacgccaactcgctgatcagtcctttcagtgcggcggtgatagcgctggtgatgcatcagtctgcctatgcggccgaaattgtgcgtgccggtattcagagcgtcagtcaagggcagcttgaggccgcgagagcattgggctaccgtccggcgcagattttccgtcacaccgtgttgccgcaggcgatgcgcgccattctgcctccggcgggtaatgaagtgatcggtcagcttaaaaccaccgcagtggtctcggtgattgccctccaggacgtgctgtactccgcgcagattatttatcaacgaacctatgaagtgattccgctcctgctggtggccactatctggtatctggcgatgacctccgtgctgtcggtcggccaattttacgttgagcgctatttcggccgcggtaccgtgcgcaaagaaaaacgtgcctggattaaacgcaagacgcctgctctggcggtgaacaaagagagggttggcaacaatggctgaggctatcgaactccgcaatattaccaagcgctttggcggcaacaccattttgcacggtatcaatctcgacatcgccgccggttcggtgacggtgattttaggcccgtctggatcggggaaatccacgctgttgcgctgcatcaaccaccttgagaaacttgacggtggcacgattcgcgtcggtgaacagctggtggggtatcaccagaaaggcagtgcgctgtacgagttgaacagcaaacaggccgcggcgcagcgcgccgagattggcatggtattccagcagtttaatctgttccctcaccgcaccgtgctgcaaaatatcattgatgcgccgatgcgagttaaaaagcagagccgtcagcaggcggtgctcaaggcacgttcactgttgcagcaggtcgggctggcatcgcgtgaagacgcgtggccctccgagctttcagggggcagcagcagcgggtagcgattgctcgtgcgctggcgatggaccccggcgtgatgctgtttgacgaaccgacctcggcgctcgaccctgagctggtcggcgaagtgttgctggttatcaaaaagctggcacattcgggcattaccatggtcatcgtcacccatgaggtcggctttgcccgtgaggttgcggataatatcgtctttatggaagagggaaaaatcgtcgccgcggggccgacgcaggccgtgctcgatgacagggaaaatatccgcgtgcgtaatttcttatcgacggtgctctagagggccgaatgaccgcaaaatccacgactcacagctcccattggggagcttttaccgccgtcgttcaagacgataaactggtgatcacgccgttcgcaggcgatcccgaccccagcccaatcctgaaaaactttgaaaatgcgctgaaccataaagtgcgcatcgccacgccgatggtgcgccgtggctggctggaaaatggcccaggtcccgacgagcgccggggttccgatgaatatattgctatcagttgggaggaggcctacgcgctggctgccggtgagctttctcgcgtcgcacgcgcccacggtcccgccgccgtatttggtggctcttacggctggtctagcgcagggcgcttccaccacgcccagagtcaggtgcaccgctttctcaataccaccctcggtggctacgttcgctcggtcaacagctacagttcgggcgcggcgtcggtgattttgccgcacatcgtcggtgacatgaatgaaattgctcgtcgcggcgtaagctgggaagaaatctcagaacacaccgagctgctgctgtcatttggcggtctggcgctgaaaaattcgcaggtcgccagcggcggactgagtgaacacaccgagcgcggctttattcacaaggcggcgcagcgcggcacaaaatttatctctgtcagcccactacagagtgatatgccggacgaagcagacgccgaatggctgccgattcgacccggtaccgacgcggcgctgatcctcggcctgttgtctgtattaaaagccaacgctttgaccgatgaagattttctggcgcgttactgcgtcggctgggacaagctggttgcctaccttcaggggaaagaagacggcctggtgcgcgacgcgtcgtgggccgccgagatttgcggcatcgacgccgagcgtattgaaaaattggccgtcgagctggcaggcaagagggtgatggtctccgtggcgcacgcgctgcaacgcgccgagcacggcgagcaaccggtgtggctggggctggtgctgtctgccgctctcggccagccggggctgccgggcggcggttatggctatgcgctcggcgcgctgggccattacggtaagcaccacaatcgggtttctttcccggcgctgccgcaggggaaaaacggcgtgaaggactttatcccggtggcgcgcatcgctgacatgctgcttaatccggggcaggaatttcgctataacggccagacgctgcgttatcccgagataaaactggcctggtgggcgggggcaatcccttccatcaccatcagagtctggctcgtctacggcaggcgtttaatcagctggatacgctgatagtccacgagattgcctggaccgccaccgcgcgccatgccgatatcgtgctgccagccaccatgacgctcgaacgtgaagacgtaggcggtgcaccgaccgaccgccatctcatcgccatgcagccggttgccaggcctttcggcgaggcgaaagatgactattctatttttgccgagctggcaaagcgattagggcgcgaagaggcgtttaccgaggggcgcaccgcgcgtcagtggctggagcatttgtatcagcagatgcaggaaaagtgcgagcagcagcacatcagcgtaccggacttctccaccttctgggaaatcggccagatcccgttaccgcagttgaaagacgggggacggctgttgcgtaacctgcgcctcgaccctgacaaacatccgctgccgacgccgagcggcaagatagagatattttcccagaccattgctgattttaacgacgccgactgcccgggacatccggtatggctcgagccgacgcaaaaaccggacgacgagcatcctcttttcctgattgctaatcagcctgccactaagctgcacagccagctcgattatggtcatcacagcgtgagcctgaagcgcgacgggcgtgaggtgtgcctgatgcatccacaggatgcgcgcgtcagggggattcaagtcggcgatacagtggctataagcaacgtgcgcggtacggcgctcgccagcgtggacatcagcgagggaatcagaccgggcgtggtgcagctgcctaccggcgcatggtatgacccggtggatccgcaggccgctcgcccaacgtgtcgtcatggtaatccgaacgtgttgacgctggacgtcggcacctcgtcgttggcgcagggatgctgtgggcagataactacggtaaacgtggcgcgttatcaagggacggctcctgccgtgaaggcctttgagccgccggtaatactgactcgttaagacgttttagaggcaaagagagtcagccgttttgccaacacgggcagggcggctggcgttgccagctggcacagactttcaatctcatcccactcttttggcgtcgctgaagacagacagctttgcagcttgaatcgccgttgaccccctgagccacactttgctgacgcgtcacgcggcaggtgcgtttctcgccgttttttagtgacaatgtcacttcgtgaaagcgttgggtaggatcgatttcgtccggtggtgccgaaacgtcggggcaacgctgcactttagccgccaacgccgctatctcgtcgtcgacagggccttcgccgaaatccgccagactcaggcgattgtgtaatagcgtcgccgcaatcacatattccagactgaaacgggcctcaataccgctgtgcggtacgcgaaccgaggccgcaatatcaccaccgggcgggaaggccacttcaatacgcacaatgtcggcgatgagcgtatccagcggtcggccttcttgcagccattcggcccgcagcgtaaaggccgcatcggcagcgctgtgggtgcccgcacaggtcggataaggcttgaactccagtcccggcgagacgatgcgccagggagccccccagcccgccactaatttctccgggctttcctgaccgccgccgccgctggtgaggaaggcatcgagcaccttgtcggcctgtccctgtagaccggcgaatgccagacgggtggcgataaccgccgattcggcagcgaaacccgcgtgcagaggcttgaccgccgagccaaactgcgcgcgcagcccgctggcccgagtggtggcgatgccaagaatattggccgtttgcgcaacgttggcattgagcagccttgcgctcgctgccgctgcggcaagggtgccgagcgtggcggtgctgtggtgtccggccttgtaatgctgaggacccgccgccagccccagtcgaccggcaacctcgacgccaatcacgtaggcgtcgagaaaagcgtcaccgctgatgtcgggcttttcaggcattagcgcaaacagcgcaggcaggataaccgtcgtcggatgaccgcgaaaatcagggtgaaaatcgtcgaagtcgagcgcgtgcccggcgtagccgagcagcaatgcgcgtgtctgggcgtcttggctgcgatagacggcccgcagctgagttaagggcgtatccgcaatatcgccttgaacaatcggcagtgcgacagaaacgaagtcaagcaaaccgccgcgggcctgctcacgcgcctgcggtgagggcgctgaactcacgatgagctcggcgagacgctgcgtgaggctcattgcagtttttccagcgcgctcaccgccagacggtgcaggtagtctgcggtcgggaacagcgctttatcgtccacgcggaaggcaggatgatgcagggcgtaagggccaccggagcctaccataacgaacgcgccggggatctgctgttgatagaatgcgaagtcttcaccgataggactcgcctcgaccacgcgggcctcgaatccggcggctggcgcttgttcaagggcgaaatcgacccatcctgcgtcattgaccaccgaaggcggacccgccagccaattgagggtgattttcgcatcgaaggcgtcgccgatgccctttagcagttggcgcagacggcgctcaatcagttcgcgagtctgctgattaaaggtgcgcacggtgccttcgagaaacgcactgtcagggataacgttccaggtcgagccgctgtgtacctgcgttatcgacacgacggcgttgtggtcggacggcacattgcggctcagcagagtctgtaccgcgccaatgacctgtcccagaataataatcggatcgttgccatcgtgcgggcgcgcggcgtgactgccggttccggcaatggatatatcaaagcggtcaacgcctgcggttaaggcaccggctttgctgccgagcacgccaaccggtaacgtggggtcgttatggatgccgaaaataaccgccgcgtcattgagtgcaccggtagccagcagcgcaggtgccccttcaaagacttcttcggccgcctggaacagcacgcgcacgcgtcccggcagttgatgctcgatttttttcagcaaaatggccgcgcccagcgccgccgaggcgtgaaaatcgtgtccgcacgcgtgcataacgcctgggttttgcgacacgtaatcgacgcccgactgttcatctatcggcagcgcgtcaatgtctgagcgcagtacgaccagatgcggagagtgagggtcacccagttcggccaccagcccggtggccagcggcaggtcgagaatgcgaatctgctgttcgttcagcgctgccttgatgcgtgcggtagtttcgaactcctgattcgagagctcgggaaaacgatgcagttcaagacggaatgcctgaataaactgggcaatatcctgatgttcaggaagaattttcataataggttccctgggttcatgacaatatcgagacgaattagcgcgtattttggcgagagagccatttttcatgcgcgacgggatcgaggactttcttcataaagagggtgatatggcccttgcccaaatccttttcgtgcatcggctcgaagccgcgcttttgatacatctcttttaaccatggatggcgggtggcggtgccgagtgagacagcgggggctttaagctgcttgatgagaatttcctgctcgacccagtcctggattttcttgccccagccgtggccgctgtaatcaggatgtacgccaaaccagccgatgtgtggcaggttgaacggaccgggaagcgggctccacggatagcgcagagtgacggaagagaccattttgccgtctaccagcagcgcgtacacgtcgtgctcggtcaggtggcgcgtcacgcgggccaagtctgcggttgcagcatcaaactgaatgcctaattcacgaatgggcgcataggcggcgagcatcagttcgaggtaagcgtgattatcttctggagtgagttgcctgaacacttgattcatcgattttctcgtcttttcccggtgtaaaaaataatattattatcgattgttgtttcattatcttttctttatctgcttattcatagcaagctttgatatttgtttatctaaaaaacgcataaacaattgcgaattatggaaaagcgatatagcagtaagttattgcttatttccgaatttctcgtagcatttccctaattaaatcgaacaggttaactcgacgtgcttgctattaaatccccacaaacctattaccataaatcgggtattcgatctcaggttggcgaatatattgcgccgctgtccaggcacattgcgattattaccagccctcaggcctggaaagccgttaacccgagctggaggcaagtcttaaagcgcacagtgtcaattacagcgtctcttttctagccggtgaatgtaccgaacaggcgattgatgagcacggcgctagggttaaagagcagggcgcctcgttggtattaggcattggcggcggacgcgttctggataccgccaagggcgtgggcaatctacttgaaggcgtggcgatagtgacctttccaaccgtggcggccacctgcgccgcctggtcaccgattaccattatctataacgcggcgggtggccacgagcgcagccagccgctgaccaagatgccggtactggtgctggtcgacagtgaggttattgcccgcagcgacgtgcgctttctcaaggctggcatcgtcgatgccttggctaaatggtacgaattccggccttatcagcaaaagaaccgcgacagtctggcgttaaatctcaaggtgcaggccgcacgttttgccgtcgatacgttcatcgagtttggtcagcaggcggtggaagataaccagctggagagggttaccccagcgctggtcaaagtgatcgacgccaatatcgccgtggccggtatggccaacagcatgcgcgacgactttccggctcccggcgtggcgcacgcgctgcacaaccgcatgacgcatcaacctgagctgcacgactggctgcacggcgaaaaggtcggctacggactgctgctgcaatcgattcttgagaacgacggcggcgaacccgatgcgggcctgtttgcgctgttaaagcagttcgacgcaccgctacagctgccgctgctgaccggcgatcgcagtgaaaccctgcaaaagatggcgcaggaggtgaagttctcggcgcaaaatgcggcgcgactgccgtttacgctctctgccgcgaccattttgcaggcgctacaggccacggaaaacgctttctaaattaaacaccacggcgatgaggtcaaaaggctgtctcatcgctcctcccttctatctatagcgacaatttgaatcgctacgttttacaaattttgaattatattaaggaacaccatgacccgaccctcaaattctccacgtcaaatgcgcctcggcctgtttgtacaacctctcggccatcacgtcagcggctggcgtcttacccagcgtctggggtctccgaccgacatcgactggcttatcagcatcgccaaaaaggccgaagaaggcacctttgatatgtttttcgtcggcgatgcgctggcgaccaacgtgcaccgtttgccgtccaccatggcacgccttgagccgctgacgctgttgtctgccgttgcggtcaacacccgccacattggcctggctgccaccgcatcgacgactttcagcgacccgttcaccctggcgcgcagcttctcttcgctagaccacatcagccgtggccgtgccgcatggaacgtcgtgacctcttattccaacgacgtggcgcgcaacttcagcaaagaagatatgccgggtcacgccgaccgttacgccaaggccaccgagttcctgcaggtcaccaacaagctttgggaaggctggcaggaaggcgcagtgattgccaataaagacagcgggcaatacttcgttgatgacaaaattaacgctatcgatcaccgcggtgagcactatcaggtgcaaggtccgctgaacatcacgcgttcgccgcagggcaaaccggttatcatcgaagccggttcctcagccgatggccaaaagctggcagcgcagaccgccgaggtggtgtttaccgcttctgccagtctggaaaagggacaggcgttctaccgctcgcagaaacagcaggtaatcgaagcgggtcgccaccctgaccacctgcttatcctgccgggcgtgatgccgattattggacgcacgcttgaagaagccaaagagacctggcgtcagctgaatctgctggtggatatcgacaacggcatcaagcagctttctgcccgcttcggtcttgacatgacccaatatccgctcgacggccccgtgccggaaattccagcggttgaaggtaaccagagccgtgtgaagctgctgaccgatttagccgagcgtgagaatctgactctgcgtgagctggccgccattgccgccggttctcgtggacatcgcgttatcgtagggacggcgcaagatatcgccgacgaccttcagctgtgggttgagcaagagggcgcggacggtttcaacattatgcccgctatcatccccgaacagctcgacctgttcgttgaactggtcattcccgaattgagaaaacggggtctgttccgcgaaagctatcaattctccacgctgcgggaaaatctcggcctgccggtcgtctaagtctctgttacaagccgctttcagaaagcggcttgtaaaagtagggccaaataaccatcagttaagtcagtgacatcatttgtcggcacacagtgcttacttttttatgggctatcgctgtaggatgctagagcatctaatctggatggcccttttttagcggagaaccctatgccacacattgatttgaaattcattacgcgcaacctgaccgaagctcagcaacacgcgatctccgatgatctcactgacgtgctgaaaaagcatttcggcagcaccgatgaagcggtttccattcgcctgaatgagatcccaaaagacgactggaagagcgaagtttacgagcccatcatcaaagcccatctggatgagctggtgaaaaaacctggctacaccatggactaagtcctcgccttaccgacggccgccgccgtattgattgacggcggtggccgttaatcctgattcgttaatgaaatgtttaatttagcgccgttgcccctcttcccattgattccccattaaaacttaaactttataatttccttaatttaaaatcgttgtccataagggcataaaaatacagggaatgcaggatgagtgaacagcacgtcgagccgcgcagcggaacattaagcctgattattgcgacgcttttgaccggtatcgcggcgggcatcgggggaatgctgctggctctgctgctgcacgctattcagcaccttgccttcggatacagtcctgatgcgattatcagccaggaaagctttctggaaggcgtcagtgctgccaacgcctctcgccgtttttatgtgctggtgagctgcgggctgatagcgggtatcggttggtatctgctctatcgtttcggcaaaccgctggtcagcatcgccaatgcggtgaaaaatccgcaaaaaccgatgccctttttttctacgctggtgcatgcgttgctgcaaatcatcaccgtagcgctaggctcaccgctcggccgtgaagttgcgccgcgtgaggtggggctatcggtgccggttggctgtcgcagcgttttcgcctcacgcctgccgaaacgcgggtgatggtggcctgcggtgcgggcgcgggattggcggcggtgtataacgtgccgcttggtggcgcggtgtttaccctcgaagttcttctgggtgcgttcagctgggagctgcttatcccggcagtttgcacttcctcgattgccgcgctagtggcgtgggccggtctcggaaacgaatctcagtaccatcttcctgaactcaacattacctctggactggttatctggtcggtgatttgcgggccgctgtttggcatcgccgcaaacgtcttcacccgcgtgatgacgcaggcgcgcaaacaggcaaaacgcaactggcagatgccggtgttctgcctgctcaacttcgccattctgggcctgctatccgcctggttccccagcttctgggcaacggcaaagggcccgcgcagataaccttcgataatcaaactacgctctatcttgccgccgccttgctggtgctcaagctgttggttatctggggcagcctgcgttcgggtgccgagggcggcctgttgacgccgggactgtccaacggcgcactgctggcctgcattttggggggagtctgggatagtttctggcccggcacctcgattggcgcgtttgccattgtcggcgcggccgcgtttttggcctcttcgatgaagatgccgataactgccgtggtgcttatcctcgaattcacgcgggtgaatcacgatttcctgatccccatcctttttgccgtgaccgggtcgattgccaccagtgctttaatcaataaaaaatgggctgtttaaccgtttatttaaaggtaaatcatgaacaaatacatcaccggggttccgttagagaaatcttatcgtttaatcaatcacggcccgaccattctggtttcggcgcgtcatgagggggtggaaaacgtaatggctgctgcctgggcctgcgggctggatttctcgccacctaaactgacggtggttattgataaaaaggcaaaaacccgtgagctgatggagaagagcggcctgtttgtgattcaggttcctacggtggtacaggcaccgatgaccctccagttgggtaccgaaacgttggcccagcagccggataaactggtccgcgcgggcgttaagctgttcgaattcgaaggtttcgacctgccgtttgtcgagggatgttcggcgtggctggcgtgccggcttatccctgagccacacaatcaacagacctatgacctttacattggtgagattatcggtgcctgggccgattcccgggtatttaaagacggccactggctgtttgagaccgccgcgcctgagctgctcagcctgcactatgtcgccggtgggcatttctacgccattggtgaagagattatcgtgggagaaagtcagaagtcgtaatttcaccgcccggtttatgacatttttgtcatcgggcggtcatcccgccaacccgattgtgctgtcatcttggactcatcaacgcgatactcattattaacgccgcatctaatggcgttagtttcggtaactcacccgtgaggtacatgatgaaaatagctcataaaggtttcctgtccctgcgccgctctggcccttggggcgtattaattgcggtcaccgccatgctgtggtgcagcattgcctggtcgttcggggggctgagcctgcggtggcaatcccggcaccgttaaaagatgaggcggtaagcacgtcacattcagaaaccgcactgtttgccggtggatgtttctggggcgtggcgggcgtattccagcacgtaaaaggcgtgaccaaggtggtggcggggtataccggtgggtcagctgatacggcgaattatgaaaccgtcagcggcggagagtccggtcatgcggagtcggtgcaggtgacctttgacccaacgcaggtaacctacggggatttgctgcaggtgtttttctctgtggcacataatccgacagagctggaccggcaggggccagacaccggcactcagtaccgttcagcgctgttcccgctttcggattcacagaaaagcgtggcgcaggcgtatattgcacagctcgatgccagtaaggtgtttggcaagccgctggtgacgaccgtcgaaacgcacaatcatttctatccggcggagggctaccatcagaactacatggccgagaaccctgatgcaccttacattgccatcaatgatatgccgaagctgacccagctgaaacagctgtttgcttcgcgctatcgtccagaccctgtactgacaccggtttctggctaattggcctgtttgccttcctcctgaggtacagaggaaggcaaatctgctttagaagtgagtgaaaatccagtacagcgtggcagaaagcagcactgaaaccggtaatgtcagcacccaagccatcaccagattgcgcagagtgctcatttgtagcccggaacggttcgccgccatcgtccccgcaatgcctgacgccagtacgtgagtggtggaaaccggcagcccaaacgcatcggctgcgccaatggtggccattgccaccacttcagcactggcccttgcgcatagttgaggtgcgatttgccaatcttctcgccgacggtcacaacgatacgtcgccagccaaccatcgtgcccagtcccagagcaatcgcgaccaccacttttacccagaacgggatgaagcgtgtggcgttatccagctcgcttttcaatgcgcccaaatcacgctgactgtcggccgacagcaccaactgtttatctgccttgatgcgtttgatggcctccgaggtgaggtacatgtcgttacgggtgttggagaccgccgtggccgggattttgctcaccgaatcgtactgacgaatttcatcaccgatggttccggtcaaggctgccaatgccggcatgacctctggcgtcagctcggaggtacgcacgtaggtgcttaatacgtcacgcgcgggggcggtcagagtggccggaaactgccgttgcaaatcctgttgggtcacgcttgccaatgcagcgacgcgtgggatctgctctggcggcattgatcggttcagcgcataggctatcggcattgtgcccaccagaatcagcataatcaggcccatgcctttctgcccatcgtttgagccatgggcgaaagaaacaccggtgcaggtgaggatcagcaggccacggatccacggcggcggtggggtatccccttaggtgcagaatacagtttgggttgtttgaccacggcttttagcacccacagcatcagcgctgaaaatacgaagccgataatcggcgacagcagtaacgcatagccgacgttcagggcttgatcccagttcacgccgctggtgccggtgcgtccgtgaatcagggcgtttgccacgcccacgccaatgaccgacccgatgagcgtgtgtgaggaggaggcgggcaggcccagccaccaggtgccgaggttccagataatcgccgaaaacagcagcgcgtacaccatggcaaagccgccaccggtcccggcctgcaggatcaactcgatgggcagcagcgaaataatcccgaaggcgacgacgccgctggagagtaaaacgccgaggaagttgaaaaagcctgaccagacgaccgcggccataggcggaagagaatgggtatagatgacggttgccacggcattggcggtgtcatgaaaaccgttaacgaattcgaacccgagggcgatgagcagcgccagtccaagcagtaagaaggggatgtagctggtatagacggcaccggtatcgctaacatcgttgaacagattaaccccggcaaaagcaatgccgagtaccagaagcagtaaaaagaagataacggtgaatcggttgttcttcttgtatatttttggattgctctcggacgtgaggggaagtgcaccccgtcgaatggcgttattgtcactcatatttaacccctgaataggaaaatgggaaagcaaacgcttaataagaactgaacccattatttttgtaatgcgtgacacatttatgtcaggggagtgaattctaggcacctgatgctgtcatgctgtcaattttcgtgacgctgtcactttatacgcgcatcaggcattatcatatttgattaattagcgagcacatgaataagattcactaatgttttattgctgctcaaatgttatctatgctatcaatgtttaatcagtttgattaaatattgtctttcagggagttagcatggagttgcaagagcgggccgtcggcaacagtcaaattgtcaatgttgctttcatggcggttgcgctgatattaggcgttgcgggggcgctgcagatgcccgttgtcagccttttcctcacccgtggtaccggtgccagcccaatgatggtcggtattttctataccgttaacgccattgcaggcgtcggcgttagccaagttttggcgcgacgctctgacgcaggcggtaaccgtcgcctgctgatcctaggctgctgcaccattgccgtcctcaacgccctgctgtttgcttttaatcgacactacatgacgctgctaacgcttggcgtggtgatgacttcactcgccacgaccgccatgccgcagctgtttgcgttggcgcgccagtacgccgatgaagcaggctgtgaggtggtgaagttcagcacgcgtatgcgggtacagatctcgctttcgtggattattgctccgccggtggcgttttttactctcgcacattttggtttcaccgctctgtatctcaccgtggctctcctgtttgccctcagtatcgttctggtactgacgctgttgcctgcgcttcatgctgctcctgtgcaggccgccaaaggcgcaggaatgcacagggcaaccaagaatcggggtgtcggctgtctatttgccgctctggccctgctgtggggcagcgatacgatgtatctcatcgatatgcctgtctatgtcagcggaatgcatggcgttgccgaggggtttgcaggctggttgctgggcggtgccgcaggttttgaaatcctcattatgctgttctgtacgccgcttgtgacgcgttttggcaaaaggccaatgatgctggtggctgcgctttgcgccgcgctgttttataccggcatggcgacggtgaattcgccgctggcgctggtggcgatacagctgcttaatgcggcttttattggcattgttggtggaattggcatgctttatctgcaggagctgttgcctggctcccccggaaccgccagcacgctttacaccaacagcattgccaccggtgccatctttgcaggattgatgcaggggcagcaagcgagcagtttgggcatcaggccgtttactggctggcaatggccgtttcgctgctggcgcttttcctgttattgcgcgttaaagacgcctaatgctaacaatttgctatcaatattaattaatttttcttaagtattttacctatttggttttaattggcatgtcttaaaacggggtgtccatccaggaggaggatcgagtgttaaacacagtcgcgattgttgatgcattgtcgaccggcaacgagctggcgaagaagtttatggagagcggataccgcgttgttcatgtctggaatgatttcacacgtcaaaccagagtcagcgggttcgtggaaacgataaagtatgagggctcgtgcgagcagatagtttcaaggctcagaaagtacgatattcgctacgttattgctggctctgacagtgggattgagttggccgacatgttggcctcgatgatgggtattgttgagggaaacagtcctgagaccacggcctggcgaagaaacaagtaccactcgcatcaggtattagcggaaaacgggcttcgttcaatcaaacagtttaaatcttcgtcggcagaggcgttggttaactgggcaaatgaatgctgtggttatccggttatcgtcaaaccgctaaacagtggggcgagtgacggggttacgctgtgtgaaaacgcgaaagaggtggcgcaggcggccgcaaaacagctgggtcaaaagaatcttcttggctatgtgaatgaagagctgctgattcaggaactggttgatggcgtgcagtacttcgttaataccctgagctggaacggtaaacatcacgtgaccgatatctgggaacagatccgcagtcgggttaacggcggtgcctataattttgagggtatgcatcttatcccggcgatgagccaacggcgcatctgctgtcatcctatgcctgcgacgtactgtctgcactcggcgtaaactatggcgcggcgcataacgagattatcctgacctcagaagggccggtattaattgaggctaacgctcggctgatgggcgcttctatcaatgaagagtctttcacacgctgtttaggctatacgcaggtaagccgctgcgtggagatgtatcttgaaccgggccgtttcctgaatgaattagtgggtaaagactacaggctgttgtctggcgtttccgaggtgtcgttcctgtttaccggtgatggcctgttggcgggaatgccggcacgtgaagccatcgaaaatctgccttcattctctaacttcttcggattaccgacgctggggcagcaggtgaagaaaacgacggataccaaaggcctgccgggatttgtctatttggttaatgacaataaaacgcaactggagcaggatttccagcaaatattaacctggcagagcgaaggaaaaatattcgatattattagttaatcaccccattgatgtaacattttaaaataaataagcgattaatccggtgcaacgccgtggctcccccatgcctgcaatacggaataacgaatttggaaataataatgaatagcgaagagagtatattatcaacggtaagctttctctcgaggaagtacccgcaggcttgctcgttctcattgggcaggcccaatcccgaggtttatgcattgcttgattttgaacactatcgtcaggtctataaaaatacgcttgatgaaatgtttagtcataatcagaaagacattaatgaacatttgtgtacctatgggccgagtcagggggttattaatggccatgtttcgcggtggttatccattgatgaaaatatccacgccgccgaaaatgacatctttattaccaacggatgtcaggaagcctataaccttattcttctgcatgaattacgcgaggagagtgattgcgtattgattattgagccaacctattttggttttaatgattgtgtttccgtgttagggaaatcgtcggtcacggtctccgttaatgacgtcagtgacgaggcgggcgctttccagtttgagaatctgaccgcgcttatcgccgagtttaaaagccagggtaaaaacaccagactcctttatatcaatcctgactttaataacccaatgacttaccgtttgtccgagtctgagaaggcaacgctgttggcagtgtgtcatcaaaacggggtcaagattatcgaagacagtacctattctggcttctattttgacggagagcgcggtcactccattaagtcgcaggacccgcatgggctggtgtactacgtgggatccttctccaaggtgatgtgcccgtcgctgcgtttggggtatctaatccttaatcagtcagacgccgcgacgcgcgccgatatactgcatattaaagaccacaccagcctgagcaccagcgcactgaatcagcaaatcgtggcagggtttttaattcactacgggtactcggtggaggcttgggtacgtcccatccgtgaagaatatcaacgtcgccgaaatgccatggtcgaggtgctgcaaagtgaattggatggctcgccaattaaatggcaacccccgcaaggtggattctttgtgttcctgaaattaccgttttcaatcacctcaaaggatttaattcactgcgtcgagaattatcaggtcacctttatgccggttagttatttctctcgacgagaaggcaaagtgattaacgggatccgactggcctttagctattacgagcctgaaattatcgagcagggcacgcgagaattctgcaagtttttaaaggagagatttctatgaatataaatacccgtgattcccatgcccctatattttagcctgtgcgcatgacgttcctgaaacctcctatacccagcatgaagtctgtgacaatttggggataaaagacggtcgtattcgctcgatatttattaatagcggcattagcaaacgtcatttgtcgataaaagagatggcaaagagtgagcctaacgccgagtcacacggtgaaatgctgaaccgtcatgaatattccgcgcttgaactgggtgcgaatgccatcaataaatgcctgactaaaatcggtaaaaccgttgaggacatcgcctgcatttgctgcgtgacctcgaccggctttctggtaccggcattaagcgcccgattttgtcagtcgctgggcctctccgagttttgtaaccgcatcgatattgttggcatgggctgctctgcgggtctaaatggcctcgatgcggtcaaaaactggtcggtggtcaatccaggcaaactggccatcgtggtttgcaccgaaatctgttcggccgcctacctcgaagacggcacgatagcgacctcggtggtcaacagcctgtttggtgacggtgccagcgcggcggccgtggtgtctgaacccgcagacaaaatcctgcccgctggcgctgttcgactgctcgacaagctcagcctgacggagtcagaggggataggcatgatgaagttcgactggaacgacgagcagcacaagaacagtttttatctctcgaaggatgtgccttacgtagtgggttccaaggttgagaaggtcatcaacaggctactcggcgaacggtcgcttagcgtaagcgatatcgaccattggattgtccactcgggcggcaagaaggttatcgactccatctgcatcaatctggggctgaccaagaacgaccttcgccatacgcgcagcgtattgaacgatttcggtaatttatccagcggatccttcctgttctcgctggagcgcttacagaatgaaaaaaccgccaacaagggtgaccttggggtgctaatgaccatgggacccggcgcggccatcgaaacggccttggtacagtgggccgaataaagctcctcgtttcttttgaacccacgattgaattcaacccattttaaagaggtgtgttatggaacgtctgaacatgaatatcgaagatactgcatcaatttcggtcgagcttatcgaaaaaattaaccagctttgcgcgcaggccgaggccgacgagcaggtaaaagtcgttggctttacctttggcaagacctcaggggccgacgctggtgaagccatcgccgacgttgcgctgctgcacaaatgggagaaaagcctgcgacgccttgagaatgtcaatgcgctgattgttgctcactgtgaaggcgaactctcgctggcagcgatgtcgatactggccgtctctgaccttcgtattggaacccccgcgtcctctttcggcttgaacggcaaagaggtcacggtaccggggatgctgattcaccgcctgacccagcagttaaatgccaacgggttacgttcactgctgctgcttggcaaccgctggtccgccgaagaggccgaagccaatgggctgctagatcgtctagccagtcagccgcaggcgttgaccgaagacattatttttggacttaatccacacgcctttaatgatatccgcgtgcgtcgcaagcttatccttgaggcgagcaccgcctcatacgatgaaacactgggtctgtcgctttcggccagcgaccgaatcatgagaaaaggctgagaggcagacgatgtccgacctgataactgaaaccttaaacaacgcggccaaacgggtgaaatcacggctggccgaactggcattgacggcggatacgccgagcgaaacgcaaatcgaacgctgcaatcaagacaggcaaatccaggccttttttgaggaaaatgcgttggcactgtatgagcattggaccgcactttactcccgttcgctgcgggtgacggacctgtttgaaaggacgttctctgtgcttttcgcgccgcaaaccacagtcagtgatgtgcgcgtcgttgccgactactgtttttcactgttcctgcagcaggtgctgcagagtgaagaccatggaacacacctgctgcatgcccagcttgagccaaaggcgctttcgctgtctctgatgaggccgtttgccgccgatggcaggcttcgtctggcgtcgctggagatgacgcgggagggcgaggcggcggtcatcaccttcctcaatggccataatctcaacgccgaagatggggaatttgtcgatgatttagaaacggctatagatatcctctgcttgtcgccagatatcaaggtcggcgtactgcgcggaggagaagtcacccatcccaaatatgctggcaagagggtcttctgctccggtattaatttgaaaaagctgcacagcggcgaaatatcctacgccggttttctcattggccgagagatggcatgcctcaacaagcttatccacggcgtgacatatccgacgcctaatcttgtcagcagagccgttaaaccctggattgcggtggtcgatacttttgccatcggtggcggcatgcagatggtcctggcctgcgattatgtgattgcggaaacgggcagctatgcctcgttgcctgccgccaaagagggcattatcccggcgtttccaatctgcgcctgacggcggccaccaccgagcggtttgccaagcgggtcattttgcatggtgaacaaatctacgcgggcgctgcctattcagattatatttttgaccaggtggtgacgtcgcaagagctggacggagcgttggccgacgccgtcgaactgatggctgcgccggcagttccggccaataagcgaatgatttcgctttcgaaagagcctttatcggccttcagacactatatggcgagcttctgtaccgaacaggtcatcagaatgtattctcgcgatgtcagggaaaaaaccggcaaatttgctcaaaaggcgaaactgggttgaaagcaggagagcgtaatgaccaagcaggatgaaaatcctcaggcggtgcagtaccaaaaacgggggcgggtggcgtatatcacccttaaccgtcctgacgtacttaacgccatgaatctcgagatgcaccgccaactgctggcggtatgggaaacggtgaatcaggacgctgatgtctgggtggtggtgctggcgggcgagggggccgcgccttttcggtgggacaggatctcaaagaactcaagctgcgctatgaggccggtgagccaccgtcgagtctgggcagcggcggtcgtgccggatggccgagatttaccgagcgtttcgacatccataaaccggtgattgccaaggtcgacggttatgccttcggaggcggctttgagctggcgctggcctgcgatttgattgttgcaacggaggagtccgttttcgctctgcctgaggctaagctgggcctgattcagggcgcgggcgggatcttccgactgacgcgacaaatgccgcttaaacaggcgatggaaatgctgctgaccggtaaaaggatcaccgcccgtgaagcactggaatttggcctggtgaatcaggtgacgacgaaagagaatcttgatgaagcggtgaataagctcacgcaagatatcctgcgctgttcaccgatggcgattcaggcgattaaaaatattgcctatgaaagcgccgacaagagtctggaacaggcctttgccgctgaatactacgccgagcagcagcgtttacagagcctggatttagttgaaggcgttgatgcatttttggaaaaaagagatcctgtctggtgcgggagataattatgttattttatcttatgttttaaaaaaccttagattggtcgatggacaatatagaaaaccttaccgcgatggtggtgtttgcccgcgtggttgaaacactcagctttaccgaggccgcaaaatcactgcggctctcgaaatcctctgtgagccgagaaatagccagccttgaagtgagactcggtgcgcagctgttgaaccgcaccacgcgtaaaatcgcggtcaccgacgtggggatgagctactaccagtactgcaatcgtatactgaatgagattaagggtgccgagcatttcattcgtcactttcacgaagagccgatgggcaatctgcgcctgattgccccggtgacctttggctgccaatgtgttgttccggtgctcaaccactatataaataacaatattcacgtcaacgttgacctggacttaaccgatcgaccggtcaatatggccgatgagctctatgatatcgcgattgtcatcacccgcgacaggccggaagccgcacagataaaacctttgattccaatcacctggggtctttacgccgcgcccaaatacgttgcccgactggcaaaaataaccaagccggaagatttgccgcgccacgactacatcctgttccgtgggccagcacacacgatttcattacctttttataaagacaagcagaagctggatattgaggtgcgcagccgtttcagaatgaacaacagcgtggctttgatgagttcggcgatggccggaggcggtattgcctacctgccggactacattgctcaggagtcagtacgcgaaggcaagctggtgcggctgttgcctgactggaagatggacacctatcattcctgggttttattcaaatcggacagcggcctctcggcgcgcgtcaggctgtttgtggacgacctcgagagaaagttgcgccagctttacctcacgccttctgattagaggctgaaaaataaaacggacacccgaaggtgcccgtgcatttctgaccgtagccgcagggattagtagtagttaccttgacggtaatcccaggtcaggaaaatatcagacatgattgacatgattttatccacatccaggcctttacggatcaggatagggcatggggtcacgctgcgttggcctttctgctctggaaccagcgtgccgttctcgtcaaccatggagaccatcacgccttgctcgtagcgggttttctcggtttcgttcggttgaatcgaggttacgtattcgttggcttcgataatcaggtctgcgtgtgattcgatacgctcgccgatgccttctaccttgccgcggttgcctttacctgatgggttagcggagctggcgaaggagaacttgccgtggttttcccacagctctttggccagaatctcacccggcttaccgaatttgatcacgaagcagctggtgtcgcgcttgtccatcatcatggttttagaaccgtcgtctggaatgcgtgccttggcgtcttctttccacggcaggatgcagcccaacagaatgtctttgtcccagtgctgctgatacagcgcttcaatctcagggttcagctgagccagtgacttcagctgctccagagaaccacacagcacaacgcctggcttgttacggttacgctctttggcttcaaacttgcgatccagacctttagcgtctgaagtcatgatgatgtagcccactttagtcgggcaaacgatcatgccgccgtctttagacaggatttcaactgcttccggctgtaaggcaccgttccactgaatttttttgctagacatgttcgcgacctttctattttaaatgacattaacgggaagtattcggcgtgccgaatcagtgaaatcatcctaccgcattttttctaaaccgcgagtattttgcagcaaagtgtttgattgtttcattctggcaacaaaaggcgcagggaagagggtattcgtgctggccctgggattcggcgctgtgctataactcggccatcctctcgatatgattgattattatgaagcttcccgatctaaacctgattattgcgctcgatgccttgttagaagaaggctcggtgattggtgctgcgcggcgcatgaacctgagtcccccgcgatgagccgcacgttgacccgcatccgcgagcagcttggcgacccgattctggtgaagactgggcgcagaatggtaccgacgccgcgtgcgctggcgttgcgtgaacaggtgcatcagacgatggaaagcgcgataacgctgctgcaacctgagtcggtgctttcgctcgcggcgctggagcgtacttttacgctgcacgccaatgacgtgtttatcagcgcctacggcggcgtgttgcttgcgcgtttgcgtgaggaggctcctaacgtcgggatccgctttacgccagaaaacggcagcgatgaagacagcctgcgggatggcaaggtcgatctctatatcagcgcgatgcgcccgctgggtgacgatattcacgtgcagtcactgtttagcactcggtttatggggctggctcgcgaggatcatcccatcttcaacgccgagattaccccgcaaagttatgccgcctatgagcacattagcgtctcgagacggggcgggcgcggggtccatcgataaacagttggcagagtcgggactgctgcggcctatctcgctggtggtgccaaccttccactctggcgtgttttcgttaggcaattcagacctgattctttcgctgccggagcacgtggtccgcgcggtgcagagcatggggattaaagcgcgcagctttgcgctgccggtgacggtcgaggctattccgatagtgcaggcctggcatccgcgttttcaacgtgatgctgctcatcgctggctgcggcgcatcattcatgatctgtgccagtcgtgcgtctgacgcactcctcaactgcaaacatagcaatttctcaatccctcgcgcctttctagactgagcctctcattaatctgtagaggacaagtaatggaaataaccgcgcaacccaaggtttcgcctgctgccgcaaccttcaatctgcgcatcatgactgggctggtgggcattctgctggcgtcgctgattgccggctgaatgaacatgtgaccgatattgcgatgcccgacgtacagggggcgatgtcaattagccacgacgagggcagctggctgactaccctttatgaggcgacgcaggtcgctgccatggccttcgccccctggttctcggccaccctctcgctgcgtcgcttcacgctcagcgttaccgccgcctttatgctgttgggcgttctttgtcccttcgcctccaacctgcaccagctgtacctgctgcgtgcactacaagggctgttcggtggctgtctgccgccgatgttgatgagcgtcgcgctgcgcttcttacccccggcatcaagctttatggcctcggtgcctacgcattgacggcaaccttcgggccaaatctgggcacgccgctggcggtactctggaccgagtatgtcggctggcgctgggcattctggcaggtcgtgccggtttgtttgctggcgatgagcgccgtgtactgggggatccctcaagacccgctgcggctcgagcgttttcgccaattcaactggcgcggggtgctgttgggttttccggcgatcgcctcgttggttatcgtgctcgagcaggggacgcgacttggctggctggactcgccgtttattggccgcatgctggcgttggggctggttagtatgacgctgtttatggttaacgagtggttccacccgctgccttttttcaaggtacaacagctggcgcggcgcaacctgacgttctcgctgattactctcggcggcgtattggtcatcctcgtcgcggtaccgggcattcctgccgcttatctggcggaggttcagggatatcggccgctgcaaattgccccgctggcgctatatgtcgcgctgggtcagctgctcgcgctgccgctggtttcttcgctgtgcaacctcaatcgggtggattgccggtgggtactcgccgtcgggctgggacttatcgcgctgacctgctatctcggcagcgcgatgacctccgactggatccgcaataacttctacggcctgcaaatgctgcaaattctcgcgcagccgatggcggtcattccgcttctgatgctcgccaccaatgggttaccgccgattgaaggtccttctgcgtccgcctggtttaacacggttaaaggaatggcggcggtggtgggcaccggcgtgcttgagggagtgactacgatgcgtgagcactttcactcccacacgctggtcgacaggctcggcgggcgttcactttggttagcgcagcagcatgaaggtctcacgcggcttgccgggcaaattagggcgcaggcgctcgtgctggccagcgctgacctttatcgtgtgatggcgtttattacgctgacgttgattatttttattcctctgatggcgacacgggtttatccccgcgtcccgtcaaagatgcttaaggtttgacgatgaccccctctttattgacccctaaaaaaaccctgattgccatcgttggcgcggctgttttggcgatcgcgctaatttgcgggtggcttttttccaccagcacggaccaaaccaccaacgatgcgtttatcagtgccgattacaccctggtaacgccgcgcattagcggacaaatcacccacgtcagggttgaagataaccagtatgtgcatcaaggacagccgatgattgatattgatgaccgcgacctgcgcgcggcgctcgatgcggcaaaggcgaatctgctggttcagcaggccacggtcgcgaacgctgaggcgagcctgatacagcagcagtccaatattcatcaggcggcggcgaccctggcggcaagtcaggcgacttacgtctttgccaaagccgattttgcgcgctatctcgacctggcggcgcagggcgcaggcagcaagcagaacgctcagcaggcgcggtcgcgtatcgataccgcgcaggctaacgtcgcacgagacagtgcctccctggatgcagcgcgtcaaaaaacggcgattctgctggccgagcgtgaacgcgcaacaggggagttgaaacgtgcgcaggctgctcttgatgccgctgagctgaacctttcctatacgcagattgttgcgcctgtcgacggttgggtcggtcaacgcgtcgcgcggcagggagcctatgtcacgccgggcaatacgctgctggccctggtaccgctcaaacgtgcctacgttatcggtaattttcaggaaacccagcttgagcacgttcgtccgggtcagccggtggatatccgcgtcgacagcttcggcggggccacgctgcacggcgtggtagacagcttcgcgcctgcgacgggcgtgaccttttcgcctatcgcccccgacaacgccaccggcaattttaccaaggtggttcagcgtattccggtaaaaatagtgcttgatgcgggccagcgtgaggcatcgcgactgttggtcggaatggcggtagaggccactgtgcataccgccgcaacggcggggagcaggccatgaagagggtatctcttgcactgagcgtcacgctgcttggcggttgtaccttgggaccagatttcaaggcgccgcaggtcacaggcccggttgtctggacgcagggcagcgccgccagccgcacggttgacaaaggcatcagcccgcagtggtggggcatttttcacgacgcgacgctgacccgcctgattacgcgtgcggcacaggctaatcttgacctgaaggctgcgaccgcacgactgatgcaggcacaggccgaacggcgcgttatcggtggtgatagccagccgtcggttaacggtgcggtcagttatcagcgtgcgcgcaacagtcaggagggattgcaggatatttcgggccttgacggcaaacgagcctataacgtctggcagccgggcgttgacgcttcctgggagctggatatgtggggccgcgcgcgtcgcgagctggagtcggccagtgccagcgtcgaggccagcgctgacctccgacgcgccgtgctattaacggtacaggccgaaaccgcggggattatattcaactgcgcggcattcaggctcagcgggcgactaccgagcagaaccttaccgttgccgagcacagcctcaaattgacctctgtccgtctgtctgacggcgtggctactcagcttgaagtggccgaggcgcgggcgcaggtggcggctattcaggcgaggctgcctattttagaacagcagcagtcgcatttaatcaacgccttaagttatctgatggccgaacaaccgggtgcgttgagccgagaactgaacggagtaaaaccgctcccgctcaccccggttgaggttccggtcggcctgccgtcacagttggcacagcgccgaccggatattcgtgccgctgaggcccagttgcatgcggctaccgcggagattggcgttgccaccgccgatttttatcccagcattaccctttcggctaacgccgggcttcaggcgatgcagttcaatcagctgggtcagtggggctcgcatttttacaattttggccctggcctgaatctgccgattttcgaaggcggtcgccttcgaggtcaactggcgctgcgcaaggctcagcagcaggaggccgcggtacatttccagcaaacggtgctgaaggcgtggcacgaggtggacgacgcgatggtcgattacgatacccatcaacggcagcggcagaagctggtcacggtggtcgaagactcgcaaatcgcactcgataacgcccagcggcaatatattgccggcgccaccgacttcctcaatgtgttaacggtacaacaggcgctgctcgacgcgcagcaatcgctggtcatcagtaacaccaatgtgtcgctgtctttggtgcggctttacaaggcgttgggtggcgggtgggaaaaggcctatcctggcggcacagtttagtgtatttcgctcataaataactcagccattgcaaggggataaatggtgaggcactataaatttgcttgttattcatccgatttaatatcttttagtcttaaatgatcttggaggttttattgggttgtatttacgcccaataaaacacccactaatttaataagctgataaggatttaagatgattattaatgaagggttattaacgcataacttattgattaagcttgttaccggttctccctctgcacgtattaaagaagaagataaaggattctttcttgagggcatggggcgaatttatatgttccggtccggcggagggaatggcatcagcaaaagcaacagatctgagctgctacggcaggaagaaaatgcgctaaatagaaatttacaggatgctgattatcatcatgagaaccaagtgaataatattattcgccgttattcgtctcatgtccaatctaatgaactttataaaagacttgatattgatgtcgagaaaaaccgctatcggcaagaaaaacagcagattgaaagtagaagcgctcgggaagttgctcgaatcaataatctggcatgaagatgtcagccataaggacgataaatgagttcgtcaggtcatcaacagaatgaacaagagaataataagcttattaataatgcgattcattgtctacagttcctggggtgtcctcttgaggaggtcgatacccagcacattacgctgccaataaaaatagagtttcaatatagttacgatttctatatatcgatcaaagacactgcgctaataattagcgttgagttaaataaatccgggagcattgaatatcttgaggatgtatttggccatcagtatgagtttgaagaccttggtgagtatttttcggtgagctgtcgggtgccggaggaggtggcattgaatattgaggctctgtctgctttatttatatcaatgaagaaaaaagcggctatttttgttaattaaccctcaggcagaaaatgttgaccctcgctgagaaggagggccaaaatgaattcgcttagtgagttggcctgtagcctttgcagccataccaggcgatgtagaggtagcacaccagcggcacaacgaaagacaccagcagtgaaacgtggtcggcaacggcagcctgaatgataggcatgattgcgccgccgacgatacccatgcacagcacgcctgaagcacggccggtcaaaccacccaacttgttcagcgccagcgagaaaatggtcgggaacataatagagttaaacaggccaacgcacagaatcgcccacatgctgaaagtgcctttggtgatgatggccgaggcaatcagcagaaccactatcatcgcgttaaacgccagcaggcggttggccttgattttggtcatcagcacgctgccgaggaagcgtcctaccatcgcaccgccccagtaaagggagagcttctggctggcatcaaccgcagaaagagaggcaatgtccgggcgctccagcaggcttatcagatagctaccgatagacacttccgcacctacgtaagcaaagataccgatcacacccaacaccagatgctttttcttccacaggctgtggtctttaccgtcgtcctgctctttctcgttgctcaagactggcagcttgctgaatttaatcaccagagcaatcaggataagtaccgcggttagcaccagatagggcatctgcaccgaagaggactcgctggcatagtaatgctgaagctcaccggcaggcagatgagaaatctggtcagcggtcagcaccacggcggaaagaataaacatgccgcccagcaccggaccaatggtggtacccaatgagttaaacgcctgcgtcaggttaagacggctggctgcggtatctgcgcttcccaatgagttaacgtaagggtttgccgcaacctgtagcagagttaaaccggaggccagaatgaacagcgacagcaggaacagcggataagagcgcaatgacgccgaaggatagaacagcacgcagcccagtgcggcaaccagcaggcccatgatgataccggccttatagccaaacttgctgacgactttacccgccggataagacatcacaaagtaggcgaagaagaagctgaactgaaccagcgaggcctgaacgtagcttaattcgaatagggattttaaatgtggaaccaagatgtcattcagtgaggtaatcaatccccacataaagaatagcgccgttagcagagccagaggccctttgtaacttgtagatttttcgttcatgtaagttcctgttacttatggctgtcagattattcgctttcaatggcgcctctgacttagagataaaatgccgatgcggggtaatgcatcgttatctgaccctgatgacactcaaacagtgcgtcaataaagtgacctggcgcacatttttttgcgagcgcaagattacataaacttttaacgaagacaagcatcggcaacctttgccaacactttaaataacctaggcaaattttgagtcaggcaataagaacaagcagttaacgccagttctctgcctttgtttgataaagcgtcggtggattaatcacagttttgtgatctggatctcatcgtaagatttcgttgttacaggtcaatcgacagggtgaacggttagcggataatacgttatcagcttagctttagcgccagcgctgctgccagacagccggcgacgattctttttttctttttaaaaacggaaaatttatgtcaattaaactgattgcggttgatatggacgggacctttctcaatgacgataaggcctatgataaagcacgttttctcgagcagtatgccgaactcaaggcgcgtgacatccgcttcgtggtcgccagtggcaatcagttttatcagctggtgcactattttccagaaattcagcaggagatagccttcgttgctgaaaatggagcctatgtggtggacgcaggtgaggagatccactgtggcgagtttgccaaagagcacgttgcacgtattctcgaggtgctggcagaggttcaagacatcaatctggtggtgtgcggtaaaaacagcgcctatgctcatgtctcaatgagcgaggctatcgtcgaaaaaatgtcgaatcactatcgtcgcctgaaaaaggtggaaaacttctcgacggtagaggacattattttcaaattttcattaaacgtccccaatgacgctatcccggcactgcttaagaaacttgccgacgaggtgggtgatatctctcagccggtcggcagcggcttcggctttatcgacctgattatcccaggtttgcacaaggccaacggcctcagcctgcttcaggcgcgatggggcattaaagatcaacacgtcgtggccgttggcgacagtgacaacgatattgaaatgctgcgccatgccgggtttggttttgcgatggctaacgccagcccgaccgtcgcctcggtggcggattatcggaccgaaagcaacaaccaacagggcgcattaaacgttattgcacgggttctggacggaaaatcaccgttttagattagagaaagttttttgatactcctattctgccactgtcctcgggcagttttataaccactaaaaaatcagaatattttattgaatcgtcagccgccgttcacgcgcgcggccaaggagaaaggcagatggagaagggtgtagcaattattcctcagttgcagcagattttgaccggcgaccagttactgaccagtgaaaatgataaagcctattataccaaggggtttcgcgtcggtcagggacaggcgcttgccgtagccattcctgactccctgctgcaactttggcaggtactgaagctatgcgtcgccgctgacaaaattatattgatgcaggcatccaacaccggtgtgaccggcggttcaaccccagacggcaataattacgatcgtgacgtcgttattgtcagcacgcggcgtataaaaggtgtgcagatcattgataacgcgcaacaggttattgctttccccggaagcacgctgaccgagctggaaaaggcgctgttaccgcaccataaagagccgcactccgtgattggctcttcatgcattggcgcctcggtgattggcggcgtttgcaataattctggcggttcgctcattcggcgcggcccggcgtttactgaaaaatcccttttcgcgcagattaacaacgacggtagcctttctctggtcaatcatctgggcgtatttctgggcaatacgccagaagagatgattgcgcgtctcgaaaatcaggattacaccaccggcaccgcgccggactgggaagggaaaatctgggccgacgattatgctgaggttatccgtgacgtcgatgccaatagcccgacgcgctttaacggcaacgcgcaatacctgcacgacagttcgggcagcgcgggaaaggtagcggtgtttgcggttcggctttcgaccttcgataaaggcgaccgcacgcagactttctatattggcaccaacgatgagcaagagcttgtcgggctacgccgttatttgctgcaaaatctgcaagaactgcctcagcaggcggaatatattcaccgcaacgcgtttgatctgacggtgcgttactccaagcatgtttattgggcaatcgatcgtttggggccagaggctttgccgtctttaatggccgggaaggctaaatgggacctgcgggtgaaaaaggccggtttcttaccgcttaatctggtcgataaagtgctgcaaggggtaaataacctgacgccgaagcgcgtgtcgaaacgcatcctcgactatcgagaccagtttgagcatcatctgatgataaaaaccgaggctcgccacgcgcctgaactgcagcttctgctgacctcgtttttcgcagggaaatcggggcaattttttgcctgcgactcgcgtgaagaaaaagacgccttcctggttcgcttcggcgttggcggctgtacggtttcgtactgcgactatatgggcatcgacaccaaccagcggctgatggcgtttgacgtagcgctgcgccgtaacgatgaccagtggcgaattgtgttacccgcacatcttcaggcgcaggtgcttgaagactcctgctgcgggcactttttctgcttcgtaaaccatcaggactacatcctcaagcctggcgtagacccggtgactttcaagcatgaggtgctggagtatcttgaccggcgcggtgcgaaatatcccgctgaacacaacgtcgggcatttgtactctgcctccggtgaatacgagcagcacatgcgcgagcttgacccgaccaacagttacaatccagggataggcaagaccagcaggaaaaaatattggcgctaggttgaggcttgagccaggcggttgaaagccttgaatgcagagggttccctactagtggaaaccctctgtacaaaggctattttccttcccgacgcgcaaaacgcgcgcctttgacttaaatcattatgttttgaattaaaaacacatattcaataattaaaagtccggatcgacggccttcataacctcgtatgccgccttaacccttgcctcgttagggtaagacttattcgctagcacaatgattgccatctttttgataggcacaaacagggcgtaggtcgaaaatccgccggtagagccggtcttgttgtagatggcctgctccaacggggctgcggcgggttgatggcctgagtcggctggggctgggaaataatctgcgagccgttgttgtctaacagggttttcagcgctgacggataggcgtagttttcccacatcatatcctgcgtaaactgcccgacctggtagtaaccgcgatgcgtcgcgtctaccgctgtctgccatttggcgtcaatgggttgagttcgtagatttatgttcaggtaacgaatcaggtccgccgagctggactttatgccgtaggcctcggcgtccaataccccaggattgacgcgcaccggctgattctgtttgttatagccctgagcatattcacccattttatcggccggaacctgcacataactattgtgcatacccaacgcgggcaacatacgattttgcatgatgtcgataaacggttgattaaggctcttggccgctatcatgcccagcaatccaatccccatattcgaatagatgcgctgggtgcccgccggttgggcaggtttccactgcttaaaccaggccataagctgagcgttgtttttcacgtggtctggctcgaacagcggcaggccagaggtgtgcgtggccagatttagcaacgttattttgtcaaacgcggtgccttgcaactcagggatatagtggctggcggcgtcagagtaggaaattttgccctgctgtgcggcccagttggccaacgtcgcggtaaaggttttgctcagtgaaccgatttcaaaaatcgtgttctggctcaccgccttgtgcgtctctttggacgcaacgccatagttgtagaatgtatttttaccgttgatgctcacggcaatggccatacccggtatctgatattgggccattaacggcttgattatcgagtcgattttatcctgctcggaggatgcagcctgagctgaggcgataaaggaaaggctcaaaaatgcgatagcgataggcttgaacgtcatctcgtttaaatccttattaacaaagagtggggtcaggcgtagagggggctatttttgcacgagttaaatgaaaagaaacgataatggggcaaactatttatgaaccgtgatgggggaagcagaaatatcagtaaaaagtcaggaaaaatgacaagtcttcctgactttttagcggagggggattatttcccggcgtttttctgttccgtaaaacgacggaacacgtccagcgtttcatcactgacgtgatgctctacgccttcggagtccagccgcgccgtttcagggcttatgcccaatgcaataaagaaggcctcaaccacgttatggcgttcacggttttccgccgccagcttctcaccttcagggttaaaaacgtgccgcgataaggcaactggcgcaccaatcccgcgctcgccaaccttttcagcgtctttgccaccgtgggctgagaaacccccaaacgtgcggccaaatcgacttgccttgcttcaccaaattcctgaatcaaatcagagataagctcgacatagtcatccatgagttcccgacgatgcgcctcgcgcacctgtaaaaagccctgagcgtgatcttccacatccagcaatggacctactttcttatttttcacaacgcccgccttttttcttgctcaatggctttttacttcacttccagaagccacatacctcgcgacaatgggaggcattgtaaaccaagtatctccaaccaccaatttttgctgactttgctatggctaacaaatatagcctgtgctatacctgtacaataaaccttcttcagtacgtggttatcaagcaggagtctttcatggaacagagtctgagtttttggaaagtgtatgaccgttcaccgttgcgtttacggctcttcttactgcagatgattcaggattggctagcggaaaaacgccatcagcaggacaacgataagccgaagaaagctgactgaacatagtgagactgattaacgctaacgccttaagggagctagcgtttaagcattatcagtgtgccatcacctttaatgcctaaacgttgtgcggttgccatgacagcatgacgtcgctatccgctgtccatccggcttttacctgggtaacaggcatcttaagcatcaaattcccctgactcaaaacctcgatcatcatccgcacgcgatcccccaaacagacaaactgctgaattcctgaattgaatcatttttatatgtcgattaagactttgcaccctgaaggtaacaggctaggtttaaactggtttcctatggtttctaagtcaaaagggatgaggtgaaaacctttatgcatctgattattttctgtgacggtacctggaatactcccgagcaaaccgacggcggtatatctgttcccactaacgtggttaaaatgcgtaactcgctcgaaaaaaccgataaagaggggcttgagcagcgggcttactatcatcccggcgtcggcaccaaaggggcgcaatacgtcgcattattgacggcatcgtcggtgacgggttggataaaaacatcatgagtgcctactgctggctggccaaaaattaccaggttggtgccaccatctggctgtttggcttcagccgtggggcctttaccgtgcgtagccttggtggcatgatttcacactgtgggctgctcgacctgcgctcgcatccgctaagtgagaaggaaacctggtcagcggttcaggatgtttttaactgctaccgtgcgcaaaaaacggtcatcgccagtgaagagcgcgcctttcactacgtcacgcccggccagtcctgtagccacaccgtaccgataaactttattggcgtatgggacacggttgggcattagggatcccggaagacgtggcgtttctgagtctactaaacggcagctcgcgctataaattccacgataccagcctgagtccgatggttaaaacggcgcgtcacgccatctccatcgatgaaaagcggcaaacttttatgcccacgctgtggaccggcgttgatccaacgcgggacgttaagcagatttggttccccggcgtgcatgcggacgtgggcggaggctacgtgcagcatggattatccgatggcgcattgcgctggatgatagagcaggccgaagccgaagggctgaggtttagggaggcttcactcgctcagatagttcccgactctctcgaccagcagcatgattccgcgattggagtattcaaagatctcaagacccgcccgcgcaacgtgccttttttcagcgacgagaacccctcgttgcatcagtctgcgctcgacaggcatcgcaacccacctttgactcagcgtgactattggcaggggcaagcgctgaagaaagagcaatcaatcggcgttgaggttttcgcacatgaattctggaattttaccgggttttatttgcaggcgggcgtgacgtacgagtttcatgccacgggtgagtggctcgacggtcatattaactgcgggccgaaaggcactcgcgacggtaaattccatttcggcaaaattccgcaggctttgtcgtcactgttgggcaaatttgagctgctctacagcaagatgaccggcaactatcaggccgatttctggctcaccaagcgcgaagaacgtattggctggtttgtgctgacgggcatggtcgccaacgattatctgccggacgcgaccccgaagcataaaaatgactttttgccccacgaggtgttccagataggtgaaaggcaagtcttcacaccgaaggccagcggctacttgtatgcttttgccaacgatgcctggcaggcgtacggcaataatcgcggcagcgtaaaactgacggttagccgcagatagattttacgatttccctgttactgcaaaaaatcccctatcaaagccggacaggctcattctcacggcgcaccaattctgtgcgccgcaccacaaaatataaaattgcttatccctgttataagggattattttacccctcaaatttattctgcacttgcacagtgcggatgctgatattcattggttattttgcaccaaaacaatgatttatttcatgccaattcttatctagccataagaaaattgaatggctgctgatatttgacttaataatgttatcttcatcacaaatatcatgcttgtataataagttaacttaatgattttaatcaattttataattaattttaattctcttttttgtgttttttagcctcttaaatagcccttcctgaccctttggttcagaaaaaaaacgttgaacatttaatttttaaaatgataaaacattctcattcgagaattgcttttcatttttactccctacattgaggtctgagaaaatggcattagaaacagcagaagttcgtattgctccacgctggaaacgtccctcaaaagagtggctcgatgctttcgccgcttttcctgttgccaatatcggcgacgccatggaacgcctgagtatgtgtgacgcagggattattcccctgaccaatcacaccgcctttaccggttttgcatttccggtacaggttacggcgggcgataacgcggcggtgatcattgctctcgactacatcgaagagggcgacgtgatgatgatcaacggcatggggcacatcgaccgtgctctggtgggcgagcagttgacccagcgctttcaacacgccggagcacgcggtcaggttatcgacggtgcagtgcgcgacaaaaaaattattgaatcaactgatttcccaacctactcacgtggcacgagtcctgcagggccttacaagaatggtccgggcgtgataggcgaaccggttgccatcggcggcgtggtttgctgtgcgggcgacatcgtcgttgccgacgacgacggcatcatcattattcctttctggagagcagaggacgtcctggagaaagtcaaggaagtggcaaaacgtgaagccgagatgaccgcagaagtcaccggacaataccgctaaatcacagcgcacaagaccggcccagccaccgttttgggccggatttcatcactactttagcagggcagaacaatgaataaatctcaggttgcatcgatggattacgctttgccggcgagagactcggcaaaaaacaatatcgtcaaacgtgcttcactggcgggcggcgtgggatcctttgttgagtggtatgactacggcatttacggtcttctggtgagtacgctggtgctagtgttttccgccagcagcatgaacacctctgacgcggggctaatgctgacctacgtgggctttacggtcagtttcgttgttcgtcctttcggtggcgtaatttgtggatacctgggcgataaaatgggccgccagaaattactcgccatcctgctgttgatgatttcactggccacggcggccatcggcctgttgccaagctatgaaagcatcggctgggcagcgcctgccttgctgattttactgcgcgtggtacagggtttctcggcaggaggagaagtctcgggtgccggctcctttgtggcggaatatgccgaagatgaccgccgtgcggtcgtcatgtcgccgctggtgatggggtcgttcatcgccttgttgttcggtagcctgttaataagcggcctgattaatatttacggcgcccaggcgatgagggactgggtatggcgcgtgccgttccttttggctatcccgatggcactgatcggcgtttatatccgcacccgcattcaagatacccctcattttcagatggttaagcagaataaagcggtagtgcgcaacccaatccgcgaagtgctgacctctaaacgtcatctcaaggctatcgcgttggcggtgaccttaccggccgtcaacggacccggctactacgtgctgttcgtttatatgccgacctatctcaacaaggtgatgcatttcgctcagatacagagcctgatggtcaccgcctgtggcctgctgaccattatcggcgctatcccgatgatggcctggctctccgaccgtcttggccgtaagccactgctgattgcctcggcgatagcgatggccctgctggcttatccgtgcttttggctgctgacgctgggcatgatgccgctggcctgtatggccgcgattctgctggcctttgccttcgccggtcatgcggcggtcattcaggccacgcttgccgaaatgttcccaaccaacgtgcgctacagcgcctacagcatcggcttcaatctttctacggtgatttttggaggctctgcgccgctgctgatgacctggctcatcggcctcaccggtatcgccagcatcccgagctacatggttattatcaccgcgatgctgaccctgattagtaccttatatctcaaagaaactgccggtaagccgctacgtgcggagtaacggaccccgaatgcgttatcagagcaactgaacatctgtcgaggtaattatgaaacacacgtcaacatggcgaatgggatttgatattggcggcacgtttacagatctggtgctgctaaacgacgaaacaggcgtcgcgcttcgtcataaaacgttgactacgccgcacgatccgtccgagggggcttataccggtctgactcagttggtcgagatggcagggcttgaggccagcgagatccagacgattactcacgggactacgcttgcgattaacgcactgctggaaagacgcggcgcgaaaaccgccttcgtcgtcacccaaggttttcgtgatgttctggtgctggggcgtgaatatcgctatgacatttatgaccttaacggtgcacctgccgcgccgttaatcccccgttcacaggcctatgaaatcaatgaacgcctgaccagtaaaggtgacgttgtcacaccgttggacgagcaggaagtggtcacgttggcggcaaaactgcgcgatgagggctacgaggccgtggccgtgctctgtatgcatgcctacgcctggcccgaacatgagaatcgcatcgaagccattttgagtcgcgaactgccgggggtttcaatttcggtgtcgcacaaagtttcccgcgaaattcgcgaatatgaccgtggcgtgttgaccgccatgaacgccttcgtgcagcccaaagctcgcaactacatggcgcgtcttgagcagaagctgcgcgacggcggtttcatttgcgactggctggtgatgggctccaacggtggcctgatggctccgcaggtcgcggcggactttcccacccgcatcatcgagtccggtcctgcgggggtatcgtggctaccgccgcgtttgcccgtaagaacggtcacagccaggtgctggcatttgatatgggcggcaccacggcgaaggcctgcgttgtgcgcaacggcgaaccttccattacgaccgactatgaggtcgggcgcgccgaccgtctgttgaaaggcagcgggttgccggtgaaactgccggtggtcgacatgattgaaatcggtgcgggcggcggcagtattgcgcgcgttgattcgctcggcctgctggaaataggtcccgaaagcgccagtgcctacccagggccggcctgctatggacgtggcggcgagttgcctaccgttaccgacgccaatctggtcctcggcctgcttgacccagacgccttcctcggtgggcggatgaccctcgacgttgctgccgcccgcaaggctatttcgcgtattgccgagcctttgggcctgagcatcgaagacgcggcgtggggcattcacgaagtggccaacagcaaaatggccgaggcgctgcgcacgcactccgttgagaaaaacgtcagcccgcaccagatgaccatgctggcctttggtggcgcaggcccgagccacgcctggtcacttgccaagattctgagcgttaaaaaggtctatttcccgaatggtgctggcgtgtattccgcctttggactgctgactgcaccgccgagcgccgacttcgtgcgcagcgatcgctgccgtctacagcccggtatcgacatggcggccgtgcatcgtactttcgccgaagggtttgatgaagcctttaccacactggccgcagccaacgtagaaccggctaccgccagcacgcaaaaactggccgacgtgcgctacgtcggacaaggctcggagctgaccgtcagcctgccggatcctttatcgaacagggtgacgttgacgcactgattgccgccttcgaagacgcccattttgctcgctttggccgtacgctgaaaggacagggcgtggaagtggtcaactggcgtggccgcgttcaaaccacgccaccgcagatgaataccagcgacaagcaggctcagccagacgagggcgcgcaggagaaaacccttgccgtttatctgggccgcgacgaagggttcagcgattgtcgcgtcgtgccgcgtagcctaatggtcactcatgcctggattgatggccctgcattattgcaggagaaagagtgtgcgatttatgtcggacccggtgcgtccgccatgcttgatgaacaaggcaatattctgatggagctgaaataatgacgacctcaacccctgataacctgcgttttctgaatgacccgatcagcctgaggatcacctgggaccgtctggtcagtatctctgaggaggcggccgcgacgctggtcaacatggccttctcaagcattattcgtgaggtaggcgactattcttgcctgctgatggacgccaaaggcaattcgctggcgcagccaaaaaccagcgttccggtgtttatcgggaccttaccggcgacggtgcgtcatctgctggcgaaatatccggccgagacgctcaagccgggcgacagcctgattaccaatgatccctggctgggaaccggccacctgaacgacgtcaccattgtcacgccggtgttccgcgacggtaaactggtggcgttcaccggctcggcggcacacatgtccgacatcggcggctcgctgaatatgggctcgtcgcgcgacatgtttgaagagggcttcctgatcccgccaagcaaactgatgctcgagggcgaggtgaatcagcagctgctggacctgctgctggctaacgtgcgctcaccggatcaggtggagggcgacctgcacgcaatgcttgctgccaaccagattggtgccaacggcctgctaggcctgatggatgacctgaagctcgactcggtagagccgctggcggagaaaatccattccctgactgaaaacgcgatgcgcaaggcgattgaggcggtgccggacggacgttatgaggcggcggtcgatattggcgattacgaaggcgacattcaccttaacgtggcggtgattgtcgacggcagcaacatcacgattgactacgccggttcgtccgccgaatccctgttcggcagcaactgcccgatgtcgtttacctacgcctacagcgtttatccgctgaagtgcctgctggagccgcatctgccgaacaacgaaggctgctttaagtcgatcaccgtgaccgcgccggtaggctctatcgctaacgcccgtccgccgtgcgcggtggaaatgcgtaaccgcgtaggacacatggcgcacgccgccatctttaccgcgctttcagaaatcatgcccgagcgcgtgatgggccattccggcagtgcgccggtgacctgtgacgttttcgccggtcagtttgacgacggccgccgctttgttgaaagcctttgcgttaacggcggtactggcgcgcggccttctgccgacggaatcgtgaccggttttccgggcaacatgtcatcgacgccggtcgagcttatcgagtccgcgacgccgctgctgtttaccgaaaaatccatcgtgccggactccggaggcgcaggtcgctatcgcggcggcgtggcccagcgcatggtgatccgcaacaccagcaaattcccactctcgcacagcatgttctattcgcgtcaaaagcatccggcgcagggcgtactgggcggtgaagcaggtgcgcctaactttattgccatcaacggcaaacagctggaaaaaccggtcggtcgtcacgacgtgttcccggggatgaggtcacgattcagatgccaggcggcggcggtaaaagcccggttgctgaacgcagcaaagcggccattctgtttgatttgcaggaaggctacatcaccgaagaaggcgcactgcgcgactacggcgtcactatcgaagaattggcaaggggctgaacatggattcattacaaggaaaagtcatcatcgttaccggtgcaggcagcgggattggcaagagctcggcagagctgctggcgtcgcgcggtgcgaaggtggtgctggtggggcgtcgtaaagaggtgcttgaaggcgtggcgcgcggcattcgcgaaaacggcggtcaggcctggagctgtgcgacgcatatcgaaaataaggacgaggttcaggcgctgattagctgggtcaacggcgagcttggcacggtcgatattctggttaataacgctggcagcgccagcaaaacgctgaatgcgcgctggattgaagaagaggagtggcaacaggtgcaggacgtcaacctcaaggccgtgtttctgctgacacaggcggtgctgcccggcatgttggcgcagaagaatggcaccatcatcaccgtgtcgtcgctggcggcgctgcgtccaaacctgctgggcggtgcggcttacggggcggccaaggccggcgtgcgcaactttatgacttacctgcacaataccttccgcaacgacggcattcgttcaacctgcatcctgccgggcgaggtaaataccccgattatggataaccgcgcgaatccgccaacgcagagtattcgcgacaacatggtgcagccggaggacgtcgccgaggcagtggtactctgcgctgggctgccagcccgcacggtgattgaagaactgatcgtcgcgcctacctttatgcgtgatatttcgggtgacctcgagctgagccgctggaagggtgcaccggctgatttatcagccaaataatcatctttcggcgaaacgttcaagggtggtgagccttcgccgaacttgcaaaaattaagggtgaaacatgtcttctttagctaaaaaattcacggcctccgaggctgtattacgtatcgaacgcacttctttacgcgtgcagcagccagcctccagcggcgatatggtctcgctggcgatgggcgagccagattttgataccccgccgcgcatcgtgcaggcggcggccgacgccctgaaaaacggttttacgcactatgcgccgttgctggggacaaactgctgtgtgaagctctggcagaagaggtttcggcccagtcggggtatccggtgaaaccgggcgaagtgctggtcacccacggcggtaccgcagggttggcggcggcaattctgtcgatggtgaatccaggcgatcgtgtcgttatccccgatccgacctattctctgtacgccgatctggttaacatggcaggcggaatttgcgtgccaatgccgtgcaaggctgacctgcactgggacctcgagctgttggaccactgccttgagggcgcgaagctgttcgtcttctgtaacccaggcaatccgaccggtatcgtgcatacgcgtgaagagattgagaccctgggccgtctggtaaatcagcacgatacgctggtcatcgccgatgaggcctacagtgacctggtgtttaacggcaagccgtttacttcggtgttgcaggtgccagcgttccgcggccgtacgctgttttgccaaaccttttcaaaaagttatgccatgacaggttggcgcgtaggttatcttgctggtccggctgatatgattgccgccgccgcccgcgtgcacaattccgtcaacggctcggtcaacaccgccgtccagcgtgcggcggttgtggcgctgaaggagtgcaaggatgatgtcaaacgtatgtatgatgtttaccgtgaacgccgcattctgatgatggaaggcctgcaggccatccccggtttaaaacttaacgaaccggaaggcgcattttactgcttcccgtcatattcgttgcctattccggcgatcgatatggtggcactgctgcgcgaacagggtatcgccgtgcgtccgggcagtgagtttggtgcagcgggagaagggcatcttcgcctttcctacgccgccagcaaagaggcgattgccgaaggggtcaagcggctcaagcgcgggctggcatcactgggttgattcattattggacattccactaatggcgtaagtacagattgaaacaaggcagagagtgaaatggcaaaaaccatgcgtagtgataccgaaaggaatcgaaaaaacttgatccaggctggtgcgcggctgtttgaagtctcggaaggccctatcagcatgacggaaatcgccaacgaagccgggtttccgttgcgactgcctatcgccagtttgcctcggtcgaagaggtgttgaacacctaccgtcaggaagtgggtcagctgctgcttgaatacagtcaggagcagaccggtagcggcctcgaaaggcttgaaaaggtcagccgctactggataaaactggtgcggcagcgcggcgcggcgatggtgccgatgcgtaaccgccggggctatctcgaacgtctgtgggaaggcgcggaatacctgctggtgcaggcgaattctgtccgtccggccttgcgtgacgcgatggcggaaatgagccttccggatatcggtgataaagccgtgttcctgtggaacattctttttgacccacgtgagatttttgacctgttggataccgttgggctgagtgaaaaacaggtgggaagccagctgatgtcggtacttattggcggactacagggcttcgcacacgccaattcattctctgtggaagattatcgcgttaaataatatcgtcccttgccgcaggcgcgccctgcggcaagggcagaatctgctatctacctgaatagcttactgaatagtcgttaaaaaataacacacatttttattatcactcaccggtgaggactttcttcgcctgaatgatgagcccctaaattaagaggttaaataatgactgcgctttcttacgtttcggacgatgcagattccgcctgggcaacctatttggcgcaggttgaacgcgtgctgccctacctcggtgacctgacccgttgggcggacacgctgcgtcaccctaaaagagccttgatagtcgatatcccgctggagatggacgacggctcggtccgccacttcgaaggatatcgggtgcagcataatctctcgcggggaccgggcaagggcggcgtgcgttttcatcctgacgtcacgctggaggaggtgatggcgctttctgcctggatgaccattaaaagtgccgcgctcaatctgccgtttggcggtgccaaaggcggggtgcgcgtcgatccccgtgagctttcggtgaaagagcttgagaggctgactcgccgctataccagcgagattggcaacatcattgggccgcagcaggatattcccgcgcccgacgttggcaccaatgcgcaggtcatggcctggatgatggacacctattcgatgaacgtcggtgcgaccaccaccggcgtcgtgaccggcaaaccggttcatctcggtgggtcgctggggcgcgtgaaagcgaccggccgtggggtatttgttaccggcatggcggcggcggcgcgcattgggctggacgttgcaaccagtcgcgtggccgtgcaggggctcggtaacgtcggcagcatttctgccgagcttttctatcagcagggtgcgcgtattgtcgcaattcaggaccatagcggtagcctctatcgagaagaaggtattgatattccggctttattagcgtggcagcgcgagcatggcagcattgccggattcactcaggccgagtcgatacgtgaccgtgatttctggcttaaagcgttcgatatcctgataccggccgcgctcgaagggcaaatcaccgtggagcgcgccagagcgctcaactgtcgactggtgctggaaggcgctaacggaccgacgctgcctgccgccgatgatattttgcgccagcgccagattaccgtggtgcctgatgtcatctgcaatgccggtggcgttaccgtcagttatttcgaatgggttcaggatttctcgagcttcttttggagcgaggaagagattaatcagcggctcgactgcatcatgaaagacgcattgtccgcagtgtggaacaaggctgaaagcctgagcgtgacactgcgtactgccgcctatgccgtagcctgtgagcgtattcttatggcgcgtaaggaccggggactttatccgtaaccgcgttgcatcacgacgggtgattgcgtcatcgcgttttgtgataccgaatactaataataatactgcctccccagcagaagtcgtggtctcttttacccgccgtttggcgggtttttttatcttctatttgtgctaagcatcgccgttttatgcatttaactttgtaaattctgttacgcataatggccgaactttgattttcacgcttagggacaaccgtttatgacgcagctcaacatttctcatctcgctttcctcacgcccggcaattaccccgatgacgcaccctggcaaggtcttgaagagactctacagctgtttgagaccggtgaacggctgggctacaacggtgcctgggttcgccaacgccatctcgagcacggcgtttcgtcggccagtaccttcctggccgccgccagtcagcgtaccagcaccatcgagctgggtacggcggtcattcaggttggctacgaaagcccgttcagactggcggaggacctgtcgacggtggacgtgctgtcgcacggacgtttgaacgtcggcttaagcgccggtcaacctgctcatgccgagctgttagggcctgaggttttcgatgaccactggcgagcgcaggacttttcgtatcatcgcgttacgcggcttatcgacaacctgagcggtcgctaccttggtgacaaagagagttttatcgagtctcccggtaatcgccaacgcccaagattgcagccttatgcgccgggactgaccgaccgcctgtggtacggcggcggttcgctgcgttccgtaaaatgggcggggtcgcagaacctgaatctgttaattggcaatctcacctcgggtgagggaaccgacgattattacaccgcgcaactgcgccaaattgaggcttttcgttcggcattgccagccaacgcagtgcgaacaccgcgcatagcacgcggtagagtcgtggtgccgttcgacagcgccgatgcggcgacccgcaagcgctacgccgattttgcggcctcacgtcatgcgcgcacgctctccccacagggcgaacgccgtacgctgttttcaccagacctggtcggaagcgccgaccaaattctcgaacagcttcatcaggatccgttgctgcacgaggttgaagagctgcgcatcgagctgccgtatgagttcaatatcgaccagtatcagcagattctgaccgacttcatcacgcttattgccccggaaattggctggagtagggcaacaccggttgactatcgcgcgacggcttagccataaaccctaagcaaccgaccgttgtcgaaagaaagaaaaatgccatggttactgaagagtgtggctcaggggcagaccgcccggcctgccctgagacttttggggtgtgaacacagactgctttttgtctagacccagacttctacgacgtgagaactgccgtcgtctttgacggggatcatcctgtcagacaaaggttggccgtcgagcgtcacgcgtcgctcgtcctcagcgcgtttcacggttatctgatactgactgctgccttgttgataagtgagcgtcacctgcggccagtggtcgggaagctgtgtattgatggcaatgcagtcgccgtgacgcgtaatgcccagcagtgactcgactatcagccgataggcccagccggccgagccggtataccagctccagccgccgcgcccaacgtgtggcgtgacgctgtagatgtcagcagtcatcacgtaaggttcaaccttatagcgttctgcggcttcgcgggtcaggctgtggttgatagggttgatggcggccaacagctgccatgcgcgacgcgtttctcccatctctgcaaaggccatcaccgcccaaatcgcaccgtgggtgtattgcccaccgttttcgcgtacaccgggcagataaccgcgaatataacccggattcgggcctttatcgtcgaacggtggggtcagcagtttgatcagcccgcgttttcatcaaccaggcgttggtcaagcgcatgcatcgcccgctgcgtccgttcggcatcctctgcgcccgcaagcaccgcccaactttgcgcgatagcatcgatttggcactcggggttaaggtgtgaccccagcgtttctccgctgtcgaaatagccgcgcaaataccactcaccgtcccaggcgtggtcgtgaaggtttttcttcagttgagcggcctgttgaccgcagagagcgatgatgtcggtctgaccgagcttgtcggcgagcagggcgaagttttgcagaaccttgagaaggaagaatccaagccacacgctttcaccgagccctttaatgcccacgttgttcatgccgtcgttccagtcgccgctgcccatcaatggaagtccgtgttcaccaaatttcagaccgtatttaatcgcccgcacgccgtgctcaaacagcgattcactctgcggactgagctgaggctggccatagaatgactcctcgtcggcggccagcagccgcgtctcgagataggccacgggctggtggaccacgtcaacgtcctgagttacctcaacataatgacagatggccagcggcagccacaggtagtcgtcggaacagcgcgtgcgcacacctttaccggacggtggatgccaccagtgttgtacgtcgccctccagaaactgacgtgaggcgcagagtaagatttgttcgcgcatcctctcgggcgcggcgtgagccagcgcgagagtgtcctgtagttggtcgcggaagccaaaggcaccgccggactgataatagccgctgcgcgccataatcctgctcgcgagggtctgatagataagccagccgttgaccagcagattcaccgcgggttctggcgtggtgacctgaattttgtcgagcttttggtgccagtgatggtgagtctgacacagtgctttacgggcagactcttgattcaggaattgctgaattaactcaccggcctcctgagcgtttttgcctacgccgagtgcgaacaccagcgttcgtctgtcgccgtcgataagtttggtcgcagactggaccgccgcacaggcgtcgagcgcggaaccggttttgttggaaagcctttcctgttgcagggcggcaggtgcggccagcgagccgttgcgccctaaaaattcacggcggtcaccggtgaccgaacagtgaacgccggtgacagcgaaaaaggcggtgcgttcgctttcgggggtgccgtaatagttggtggccagcacgccgcagccgaggttgacctcggcgactcgggtagcgatgtgcatttcagatttcgcgcgcaggtcggccaatacccattcaacgtagccggtggctgagagcttgcgcgttctgccggaaaggttgcttagcgtcagaataaacagtttcaccgcggcgttctcgtccaccagcacggtcatttcgctgtcgatgcccaaatgacgatgctcaaagacgctataaccaaatccgtggcggcagaggtagtcgccgtcggtacgcaccggctgcggcatcggtgaccagatttcgccgctctcttcgtcacgcagataaaacgcctcaccccgctgtcgctgacggggtcgttctcccaaggcgtaagccgatactcgtgggcattttcgaaccaggtataggcctgcccagattctgaaatcacactgccaaagttgtcgttggccagcacgttggcccaggggccggcgtatcctgaccaggtcgaagcacaatctggtattcacgaccgtcgggtgagaatcccccagcccgttatagaacgccaacgagtcggtcggaaactcgcgcgcagggctggcgagcggagggagatttttcagcgtttcaagctttggctgcatatgaatcagcggctgcatttttttgctcattcggtcagtgagctcgccgttgcgatcgtcgatagcgacggcggccacgctcatcaaaagcgtcaggtcttctggcggaatgtgctcggtaatacgcacgaatattccgccatttttgtcaataagcccggactcagaacccacggcgatgcggtcgagaatttcgttatgcaggtcctgctgatagccctcatgggaatcattgaggataaccaaatctaccggtaaccctttcattctccagtaactgtgggcctggataagcgtagtcaccagtgcgatattttcagtttgggtgatggaaagcaacacgataggcaggtcgccggaaagcgaatggctccacaaggcagactgtccacgccggttgcggctgaggatcaaggcatctggtcgcatctcggcgctagggaagataatcgcaccggcaagctggttgtacaggttggcctgctcttcggtcgcgttaatctggcgcagcgccacctggctgtgcgagcgtgcgatggcaaatacgcggtcggcgatgttgttgtcgcggtatttttccatcatcgacaggctctgcaaacgtgtttccgcaatgccgtagaccaggtcaacgaccagcgggatcccgggcttgagttcaacctgctggcggatagcgagaatggggtcgagtaccgcaccggcgctgttatcgagcaatcctgaacggctcatcgccagaggggatgactgtgtccggccgcgtccgacaaaggccgcacggtcggtggagaaggaggtctcacgctccgtctcgccgtgaatagcggtcatgtggaacaaccacgggcagtcctcgttttcttcacgcgggcggcgatgacagagaatgccttctctgtcaggcaccagctcggtctggacaaacaagttactaaaggcccggtgcgccatgtcgttagccaaaggcgcgagtaccacctctgcgtaggtggttatctcgacgatgcgcggttgacgcccacgatgtgtcagggtcaaacgccgaatctcgacgtcatcttccggtgagaccacgattttggtttgaatgctcagcgagccttcaatgcgggtgaactcggcggcggcgtcggtaaacaccacctggtattgtccgtttttctttcccgccggctgccaggtattactcaccacttcaccggtgtttgggtcagagatatagcagaaagtgccgtagttatcgcgcgttgcgtctgcacgccagcgggtcagggccaaatctcgccaggtgctgtagccaccgcctgactgtgtcaacatcaggtgatattgggtgttcgacagtagctgaacctctggcgttggcgtgtcaacgcgcgtgaactgccgcggttcgacactaaccgattgcagcgcatcaatggtgtcaaactgcctgcgtggactgtacatggtcggtgcgtccggcacgcgttcctgcaatagcagcagggccgactggaaggaaggattctttacgaagcgctcaaccatcggtgcatcgagcagcgtgtgagacagcgcgagcaggctcatgccctgatggtgcgccatgtaggtgcgcaccagcgagaagttttcttcgtgattgagccgagatcgcgagtagtccagcgcctcataaaagccatacttaccgcgtgcaccaagagtttcaaggcgcagcaggttgtcacaggcctgctgcggtttgaccatcagcgccatcaccgaagcatagggcgcgatgaccatgtcctcgcccaaaccgcgtttcagccctaaccccggcacgccgaaagcgcgatactggtagttttgggcggcgtcgaaggccgcgtaggccgattcggagatgccccacgggacgtcgttttcttgccccaggcaatttggcgggcaacggcggtgcggcccatttgcagcagcagagagtctgggtaggttggcatcaccagctgcggcatcagatattcgaacatcgaaccgctccacgacatcagcgacggctgtctgtcgatcagcgtaaacagccgccccagcgcaaaccagctcttcaacggcagctggttggtcgcgatagcgaaatagctggtcaggcgaatctctgacggtaacaggtcatagttaccgccgtcgagtttgttagtgtcacagttatagcccacgctcagcagttgggtttctttcttatacaggaagtggaaatccatacgggcgtgatcggtgagacgcagttcaagctcgttaatcagcaccagtcgctgtcgcgccagatgggcggtctcctcaatcagcgcctgatccagacccggtactttattctccagctgcgacaaccacagcagcgaaggcagttttttgtcccgtggctcgttcttcatccaggcgaacagctgcgaccactcggtgcaaaatgcctccagctggcggtgaagctcgcgcaacccgaggctctcggtgccattatgctgcaacaggtctgtcgcaatgcccagcatggcttcgagctcgggataaaccctgtgaacagggcgccgcacggccttggcccaacgttggcgcatcaggctcaggccttcgcgctgtagcgggttggcctcattctcaatcagcagcagggtatcttcgaggcccgtcagaacctgtttgatgtcgataaccggctgatggcgaagcgcagcgataccggtggacagcaccaataaatgtccggccagattgccgctgtcaacgctcgagatatagcgtggattgagcggctgaagggtacgcgtgtcataccagttataaaggtgaccccggtagtgctcgagcttgtccagcgtatccagcgtaaggttagtgcgctgaagcagttcccctgtgtgatatagccaaagtccattgccgttaaattcgccagcagggaaaggccaatattggtcggtgaggtgcggtgagcaatcttcggctcaggcacttcctggtagttatccggtggcagccagttttcctgctgattcacaaaggtggagaaataggaccaggtctcgcggctagtgcgccgcaggaaggtgcgctgggtgcaatcaatttcagccttgggtttttctggcttgcgactgagccagccgagcagcagcggggccactatccacagcaggcctaacgccatcgaaaccggcaaaaacggcggattgatgtgctgggtcaatgccatgataagcacacccgcgagtgggttaacccacatgatgcgatacaggttttctgctgacagcagaaactgtggcttgccgtcctgcccactgctggcccattcatgcagccgacgatggctaacgttaagccgccagagggtcactacaatggcctttaaggtataagcgctttcatgcggcagggtggcaagatagataccgatgcgtgccagccgcgataaaataccgagcgcgaccgattttatatgcggcaaaagctgcacctgcgcacctttgttcaacaggttcagtgccagcgcggccgcactcggcaacagcaaaagggtggtgataaacagcagccagtaaagcgtgttgggcgccagcaacagtgcagcaaacagcatcatcagtaacgcgggggcggcgaggctccgccgcaggttatcgagcagtttccagcgtgacagcatgcttaacgggttcgggcagcgggttccgtcggcctgttctacgcgcagccgcagccagtttagcaactgccagtcaccgcgtatccagcgggttcgccgcgcaacgtcaaccagatagttggcgggatactgctcatacagcaccacgtcgctcagtaccccggagcgagcatagcaaccctcgagcaagtcgtggcttaacaccagattctcagggcaggtattgtcggtcgcgcgggtaaacatcgccacgtcgtaaatgcctttgccgacgaatgatccttcaccgaagatatcctgataaatatcggatgacatcgaggtataagggtcagtgcccggcagactgctgcacacggcagcgtaacgactctgcccgtagcgggggatctcctcggcgagccgcggctggagaatgctataacctttgaccactctttttagcgccgggtcatagaccggacgattaagcgggtgcgccatcgccgcaaccagctgatgcgcgtggtcgcgaggtagcagcgtgtcgctgtcgagcgtaatgacatagcgaacgtatgaaagctgggcctgagttgcgccgaccagggtggtaaacgtactctcctccccgagcagccagcggttcagggcgctcagcttgccgcgttttctttcatagcccatccatacgccctgcgaaacattgagctgactctcgcgatgcagcagcgtgaagcgggcgttatggtcagcgtcatagcggcggttgagctgaataatgcggttgctggcgtagttgagcaactgctgatcgagttgcaaaatagcggtcttgctgtcaaaaaagtcggcgatgagcgcgaaatagagatgctgatgagtattgcccagatagcaaacctcaaggctttctatcagcttgtcaatgccgcttcgactgcccagcaggcagggaacggcaaccaacgtggcgcattcttccgggatatgcagtgaaaagtccattttcggcagtgcgcgaggcgtgcggctgcggctggcggtttcattaagcaggtccatggtgaactggctgcacataatgacaatcggcagcagcaggagccacatcgtccagcccatgccgctctgatcgctctcgaacagtaaattcgcggtcagggcggtgataagcagactcaggctgccaagccacgacagcaggggcgttttgttcatctgatgacggaaatagttcatcaatgaatagcggatattcagcgttttttcgagctcgctgcgtccggaatcgaccagatagtacccgacgtgctgttggctgccttctggagagcgctgactcatcccgatgacatgccgggcgatttcctcttcgctaaacgggcaatggcgtgccagtttctcgatgacgtgacgatagttatcacgggtggcgaaagacatggccggataaattccggccggatcctcgtgcagcaccttttcaaccaccgagacgctctcggcaaagtcagcccagttcatctcgttcagcttacgcagtcccgcaatgctgttgctcaccgaaagttggctcagtgccagctgctgattgaagcgcacgatgagttcggcggaggttaagccaacgtcggcgagtcgttgttcaatccaggtcagcggcagcgccagcattgaaccgtgtccctgaagacggcgcaccagttcggcaacaaacgcgttggtgcgcggcgggttgctgcgtgccatatcggcaatcacgatgatgagaccggccggatcgttctccgcgctttgctgcatcttgttggcccagctttcggcaagattacgttcgcgctgcgcctgtgttacctcgatactgatacgccgcaggttttcgataagtgccaggcgcagcattcccggaaaagcccatagctcgccgagtcgcagcggggttacctgctggtaggcattgataaagcgcgtcagggtacaagcgtcccaatggccatcgctgtgggcaatagcctcggtggcgatgtcgtaaatacgcggacaactctgtgggctaaccagcgtgggcagcccataccgaagtttttaggcaacagctggcgcaccagcctgatgtgttcttcaatcaggtagaagttatcgagcagccactcaccggcgggtgcgatacttttgtctcccccggcgctgagaacgttacagttgtccgagaggatcttttcactctcggtgagccggttcagcaaatagtagggcgcctttctggtcgaaagcttgtgcgattgagccagtttctctccgaaccgctccatctggtcgatggaaaaaatttctgcggcgagggggcaacttcgctgccgtccttgcgctgtgcgggtgttgttccctgtgaagcctgggatctcttctgttcttaatccattgaacgaaagccattttcaagaaaatttcctcgcgcgtacgcaagaggatcgagcataagaaacgtaatgagtacgcacaacaagaggtgagcgaggccgaattgcacggcgttgaaagcggctaggtcaaaaaatagccatatagactcattgtagcagtgaaagccctttctccaaggtgttacggtattctggctcgttcattttgtcctaaagtggttcttaccctaatccactttttggctgagaatctctgcttcgacaatcaaggagcagggtaataatggagagtaaagcacaaacgatttcggtaggttcaggaagggtagaaacaacccctcgcggctggataaacggtttcatcgggatgctgatttttagcggatcgcttcccgcgacgcgcattgcggtgatggagtttgatccgctgtttctgacggcggccagagcggtgattgccgcactgttggcgctgagtgttcttaccttcacccgacaggcacgtccggggcgtaaaacgcgggtgccgctgctgtttgtggcggccggggtagtcataggattcccgcttttaaccgcacttgccctgcagcataccacgtcggctcattctctggtctatattggcttacttcctttatctaccgcctgttttggcgtgctgcgcggcggtgagcggccaaggttgggcttctggctgttctcgattttaggtgccgtcctggtggcaggctacgcaatgcagcatggatcggcgggttcgttgaccggcgatatgctgatgattgctgctattctgctctgcggactgggctacgccgagggtggcgtgttgtcgagagtgctcggcggttggcaggtcatttcttgggcgctggtgatttcattgccgttaagcgcgggcgcgatgctctataccgccccgcacggctggccagtagtgtcacctcacgcctggatcgcgctggcctatgtgtcgatattgagtatgtgggtcgggtttattttctggtatcgcggtctggcgatgggcggcattgcttctgtcggacaactccagctgttgcagcctttcttcggacttgcgctggcgggatgggtgctgcatgaaaccatcgaaccctcgatgatagccatcatggctggcgtgctggtttgcgtgtttggcgcaaaaaggttttcacgctgagcatcggctccgacggcgcaccggtagcagcggcggggccatgcttttgttttaaggcgctatgcgctgaattatcgcggcgagtttcttaaccgcgccgataatggcttcatcggtaaagccgcctagcccgaggataagtccagacctctcgttgcccgctgagtacatcggcgataccgcgcgcaccgaaacgcccgccgcgatagcgtattgaacaacctccacatcacgtatccccttgtgtagccacagcaccatatgcattccctgatcgcccggttgaagcaccgccagctccggcgcgatatgccttatcacggcgtttatcagcacctctcgtttttcggcatacacgccgcgcattctgcgaatgtgtcggtcaaggtgtccctctgccataaagctggccagcacgtactgatcggcgctggggggtgacggtcgatcaacattcttgcgcccagataggcatcgaccaacggctcggggaccaccacatagccaagtcgcagcgaaggaaagagtattttgctgaaagtgccgagatagataacccgctctggggacagcccctgcaaagaggggaacggatgcccagcgtaccgcagctcagtgtcatagtcgtcttcgacaatccatgaacgattggccttggcccagtcgataagggcaagacgacgcgccatgctcattggcatgccgaccggatactgatgcgaaggggtgacaaacgcagctttggcgtctgcgcaaagctcaatcccgcgggtaacgttgagcccttcgacatcaagagggacgcggatcatctgcgcctgacggccggtagtttcaaaaatggaggtgataccgtgataggcaggatcttcaacccagaccttctccccggcatcaagcagcacctgactggaaagatagagaccctgctgagtgcccgcggcaatgatgacctgttcgggggtgcagtgcaccgaacgcgattttcgcacgtattcggcaatggcttcacgcaaaggaagcgcgcctgcgggagacgcatagcctgatggagcgccggggcctttggcacgaatgcgattgcccagacgccgccagatatcatcgggcaacgtgctgccagcaggaacggaaacggcaaagggcaccggttccagcagtttgattttcccgccggcaagtgcgtagcgctctgcctgagcagagagcgccgggggctgctccaggtcttttccccgcggggtaaccggcgaggaaagctcggagagctcgttggccacccgcgtccccgagcctctcaccgcctcgaagaaaccttcggcgatgagttgttcaaatgcctcaatgaccgtgccgcgtgccagcctcagcgaagacgccagtgtccgagtcgagggcagtgggtcaccggctttgagttcgccacgctggatagcttttttcaaggcacgcgccagctgcaggctgagttgaccggcctggcggtttagctcaccgatggcgggaatatctattgtcttggcttttctaggcatcctggactgttcttgaggttatctggcttagccatttttattgaaagtggaccttaacagtaaaccactatcgcgataatttgtcgtgaattccggcatcctgcgcctattttttctttgattgggagataaaacatgtacgttgctgcgccttataaagagtcgagaagcgaatttttatatgaattaatggaaaaatatcccttgggaacgatgataacctacggcgatccagggcttgatgcagtacatattcccttcgagatagccaaaaatgcggcgtcaggtgacagcctgcgcgcccacgtcgcgcgtgctaatccggtgtggaagaacgtgcccaatggcgcggaagtgctggtggtattccaggccggggacgcctatatttcaccaaactggtatccaggcaagcataaaactcatcgcgaggtgccgacctggaactaccgcgcagtacatgttcgagggcatattcactttcaccacgatgaggctttcctgcgcgagatgctggctagcctcactgacaggcaggaatcaacgcagtcctctccgtggcggcttgccgatgcccccgcagattatatcgccgccatgctaaaggcgattgtcggcgtcgagataaaaattaccgatatcaccgcctcgatgaagctcggacagaacaaaaaatatgaagacttaaaaggtgcgggagagaatgtgctcaaggcaggaaatgaggtaataggtcatgccatgctaagtcatttaaaaataaaggactaacggataagttgctacgttttttttaatagtttaaaaacagagtaacttatcaaaaaacacgctaagctttcatctttattttaattttttggttatttaagaatatctaaatatatcgataaaatatttaaaattgtttttattttaaaattaaaaggttgtgggttttttataaaatagttttgcgcaatttttgacatgaatgggcggtcaactattattaactccgagcatcgtgctcttagattgggtcaataacaggatgttactctgaaaaaggaaggccctgtcattatgatggaacaaatccgataggaggatattatggccgaacatcgtggtggatcaggtacggacgatcacaacaaaacttcagaagcgggcaaaaaaggcggtaaaaaaggcgcaggtaacttcgctgatgaccgtgagcacgcaagtgaagccggtaaaaaaggtggcaaaaatagtcacggcgggcactagtccacgcagcaatggatgaaatgttctacgtgcaggctacccggcccacggtgaaaaccgtgggctaacctgtattcaaatgttgtaccgaaataacgctatcccgccaaaattggcagaaggaattgacgattatgtgtaaaaagagcgaccttgataaaaatcaggaagatttgaagcgagttaaagacaatcctcagcctgactacaagaaagacgatccgcttcgggctcctgaacaggaatattaatcgaccgagtcgaggattagtatttattcccccgctgtaaatagcccattaatcgctttaatgaataagcggttaatgggctgtttatcccatgcaggttaattcttaccaccagaactggtcaatataaatacccgtcattatgattccagaaataatcaccactaggcgaactcaaagcctttagtcagggtatcagaccaatacagccaggcgttttgctttatgctgtgcattgctcatcctcttttatggaggcgatgagcgttttatcgcgctgctcgccgttggcgtattattcaatatgttttgcgcgaccggcaagtggggcgagcaccatctgtagggcactcatcgccagcaagactgacagcggcaaagtccagctttgactggcctgatgcagcatgccaaaaaatagcggtcccagtgcggcgatcccgtagcctacgcactgtgccattcctgaaagctgagcggcctgacgatggtcggtggcgcgcagattgaacagcgaaaggcaggtcaccatcgaggctccggcacctaaaccggcgataaccagccagatgaacgcacaggcaggcagcatcagcagcccggcaagaccgataaaaatagccagagaagcggtaaagcctattagccgctggtctttcagcttttttagcgcgctcatgcaggcaaggttggcgaaaattgatactgcctgatagataaacagctgccagccggcattttcctgactaaagccctgcgactgcgcgtaaggggtataccagtcaatcagcgtgtaaaacaccatcgactggagagccataaacagcgaaacctgccagcccagcgccgaccgccaaggagatttaagggggcagattttgccgggcaagcgactgactgacgttgctgacggtgagcggtttttagcaacggcaaccaggcaaataccgccacgagggcgggaatgacccacacgccgaccgaaaggtgccagcctgcatcactgatctgtgccaggggtacggcaacgcccgaggcgatgctggcggtaatcgccatcgtcgaggcatagaggccaatatatttggcggtgtggtgtttaaagtcacgcttaataagcgggggagcagcacgtttgccgccgcgatgcctgaactgagcagcagggtacccagccataaaccgggttcccctgccgagatacgcagcaggctgccgagcgtaatcagacagacggccacccacaggctcttttccagtcccgcacggttgcccagcatggaggcaatcggggctatgagggcaaacagcatcagcggaataaaattgagcaaccccgctgcggaggcgctcaggccaaacgcggcgcgaatgtcttcgagtattgggcctgttgaggtaatgggtgcacggagatttgccgcggtcagcagaataataaatagaaaaaacagggaatttggcgctgtagaagcacgcgcagaaggcgtttggagctgagccatgacaataatcaccacacaataggcagcataaggctgcgaagagtgcgttggttaacgttaacgcttacgcaaaagagcaatggctctgatgtctggccgcgactttagcaatatttacaatcccctgcaaccgtcatgaagaagggagcgcagcgcgcccctttgatggttacgctttcctcaaaccccgtattgcccggccggctgatttcgtcaccaccgcgcaggcattgtccttgaccccgttggcgatggttatcacctcatcggcaatttcaccttcctgccttgagcttctgatgctgaattcgccatcgggaaggaaataggtggtgcccgactcggcggtcacctgccgcgcataaccactttcctccattttcgcatgcaatttttcatattgcgcccaatcagcttcatgaagctggactctgacggtaaaggtcgatctcgccatattcactccttttagttgtttggcaatatcaagatagcaccagtctgtgagttaggaataatttcaggggaaaacatcgctaaaaagggtcagtgccagcgtgggagaattaactattttctgattttttaaacaggcgcacgacgcgaagagatgagcggtccctggggagcagggaaccgcgcgttttcagaaggttggcagcgagttgataagctgttgcgtccacggatgtgcagggcgatggaagacgttatcaacgtgcccgtgttcgaccactgaaccgtctttcatgactaccacccggtcggccagatggtgcaccacgccgaggtcgtgagagataaacagcagcgccgtgctgtgttctgcctgcatttctgccagcaagtccagcacctgagcctgaaccgacacgtcgagcgcgctgaccggttcatcggcaatcagcagtaccggatttggcgcaaaggcgcgggcaatggcgatacgctgtcgctgacccccagagagttctcggggatagcggctcaggaaactcccgccaagctgtacctcttcaagcagctgcaaaatgcgttttttacgctcatcgccatagatcccacgctgtcgagactctcaccgatgattttttccacgttataacgcgggtcgaaagagctgagcgggtcttgtgcaataagctggatccccttgcggcgcagacgacgttcagactctggtatctggctccagcgctggccttgaatcgtgagggttccggcactcggctcggtcaggcccaacaccattctggcaaccgtggtcttgccggaaccggattcgccgacaatacccagcgtttcgcccgccgccagagaaaaactgacgtgattaaccacgtttttgttgccgtagtgcttgtagagcccgctggctaccaatacgggttcaccgctggagatatgcttgaccggcaacgcctcgccgcgctggccggacagccgcagtcctcgtgtggccggactcggtactgcggcaagcagctgctgcgtgtaggggtgctgcggcgcgcgcagcaggctctcgctttcgccttcctcgaccacttcaccgtctttcatcactaatattctgtcggctaactgccccacgaccgacaggtcatggcttatcagcagcaggctctgtccactgtcgcgacgtttttgcagcagatcaagaatctgcttttgcaccgtcatgtccagggccgtggtgggttcatcggcaatcaacaggctcggtttccccgcgagtgcggtagcaatcagagctctttggcgcagcccgcccgaaagctgatggggataggtcgcgagccgcgtttcggcgtccggcatgccgaccgatttcaacagctggatggactgcgcgcgaaggttaccgcgatcggcgttctggctggcactcaacgcgtctttgacctgttgaccaatcttgcgcagcgggtcgagcgacaccagcgcgtcttgcagcacgtagcctatctgttggccgcgaattttgcgccagcgccgctgattggcgttgagcatgtcctcgccgttaatcaaaaagcggtcggcagcgatacgtgccttgccgtcctgcaggccaatcaggctccgcgcggtcacagtttttcccgaacccgactcgccgacgaaggcaattgactcaccgtgtttcagctgcaggttgaggcctttgattaccgtcttgtcaccaaagcgaatactgaggttttgaatatcgataaaaagcgcatcactcatggctgttttccttcaaatttggcctgccaatagcgtccaagggtattcacggagataaccgtcagcgtgatagccacgcccggccacgcgcctatccaccaggcattgcgcagataatttcgtccttcggccagcatcagcccccattcggcggtcggtggctgtggccccatccctaagaaactcaggcctgcggtaccgataatggctgtacccagtcccagcgttgccagagccggcacgtgggcaatcgcgtgcggcaacacgtggcgccagatgagcacgtggcgcttaagaccgaaggttttagcctgttcaacgtagcccgaggacatcacctggaaggtttgcgccctaaccacgcgggtaaaacgcggtaccgaagcgacgccaagcgcaaagataaggttgacggtaccgggcccggtaaaggcaatcagcatcagtgccagcagcaggtcaggaaatgccgaaatcacatcaacggcgcggctaataaactcgtccagcggtccttttgccagcccggcgagcaggccgagcaggctaccgatgctgacggcgatggccatcgccgccaggctaatcagcagggaataacgactgccgtagatgatgcgggtcagtacgtcacggcccaattggtcggtgcccagccagtgctgccaagaagagggcaacatcgcgttgagtgggtcggcgttaagcggatcgtagtggctgatatgtcccggaaacagcacggcgataaacaccagcagcagataaaatgccgccagcccgtaaccgagggaataacggcgtttgacgccggatgcgataaatatttggctcatggcgtttcctcggtcgagacgggcgcgtcgcgaaggcgggggtctattagcagataaagaatatcgaccaaggtgctcatcaccacgtaaacaaaagccgagaaaatggcgaccgcgagcactaccggcagatctttgccgagcaccgcatcgacggtaatttttccgagccccggacgaccaaacacctgttcggtaatcacggcaccgctcagcaagccgccaattaaccaaccggtcagagtgacggcaggcagcgccgcgtggcgcagcgcatgacgcaggcgaatagtgatattgccgatccccaggcgcgcagcgtgagggcaaagggttcgtccaatgcgtcttccagcccgcgtcgaagtacctgggcgataaccgcgccctgtgccagcccaagcgaaagcgcaggcaataccagcgatgaaaaaccgcgatcgcccgcgacagggaaccagcgcagcgtaaagctaaacacaaacagcagcacgatccccaaccagaatgaaggggttgaagcaagcagcagctcgacggaaccggcaatacgacgaccccagcggcgatgagcggttgctaccgccatgagcacggcaaagacaacgctaattactaaggcaagaccggtcagcttcagcgtcggccacagctggttgagcaccagcccggtgacgtcggtattgagcagataggagcggccaaaatcgccgtgcaggatacgccacagatagctcagatattgactatacaggggcttatccagccccattctgcgcgaattgccgcttcaattgccggcgtacgcacctgttcaccaatcagcaggctgacgatatcccaggggccaggtacacgctgatgaaagacagcgtcaccgcggcccacagcaccagtgcgccgctcaatatccgcctgacgattcggcccagcagtaacgacgatccggaggctttacgcccggttccccgctgtgaagtgaaggtgctgtcaactgacatgatgtaactcctcgcgcttgttctgttgatgaccgattaatgcttgctcagccagacgtcataggtgttttccggcatctgcttaaacgggcggaaacccacgccgtgaacgtaggtcgccgccgcaatctggtcttccggctcatatagcgggatagccagcgcctgctgcaaaatggcgaaattctgtaactgggcatagaaggccttgcgtttggcggtgtcctgcgtctgccatgcgcccttgagcagcggaagaatttcgggggcatcggtacggctgtagttgatggctcccccggcattgattggcagatagtggttttcaatatcgacgccgtcggtcggggtgttggagttggcaatcgagccaaacttaccgttgttacgcacttccgcgtaggtgccggagtcgacatagcgaatcttcagataaacgcccagcttctgtcgtgcctgcgcctgaagcgcttgcagcaacacgtcacgttggtcgcgaaccgtggcctgagattgcacgatgtctatggtcagcggttggccgtctttggtgcggataccgtcgctgcccttggtggaccagcctgcttcatccagcagtttgttggccagctgcggattgttgccgtatttcccttccaggctgctgtcgtagaagggatcgataggcgaggtgattccccatgtccgggtacgctgtccgcgataaatcgattgtaaaattgggccgatatcgagcccttgtaccaacgcctggcgcaccttgagctcttgtgtagatccatatttaacgttcaggaacagcgagtaaggagttccggtgttaagcgcatgctggtaggtgtaatccgggttatttttaaattcactggcgtcattgccggaaatgccttcgatgacgtcaacctgacccgacagcagtgcaccggtacgaaccgatgactctggcaggaaacgataggtaacgctgttgagataagccgggccctgatgcgcggcgttggcggacgcccagtgatagtctgggttgcggacaaactcgatctgctgacccttctcatattttttcagaatgaacggaccggtgccgataatctcggtgccaccggctttcagctgtgcggatttccatgatgaaggtgaaataagcttcaggctggtggcgaaagacaggaaagggctataaacgtctttcagggtcacgacaacggtatggtcattcggcgtcgcgatgttggcaatacgtgcgccaaacaccgacagcccggagccagcggtgtaagcggggtcctgaagatggcggaagttctcggcaacggcattggcgtcaaatttctcgccgttggagaactttacgtcgtcacgcagggtgaaggtataggtttttccgtcgtcagacacgctgtaggcggatgccagccatggaatatagctgccgtcaggtttgcgggccagtaaggactcgtaggacgcgcgcagcagcagctcggttttatcctgaccattaagctgcgggttaagcgtgctgggttctgtttccacgccccaggtcaggtccccgcctttttgcggctgttctgcggcatgcagagattgggctgcggagataataagcaaggtgagtgcagacagcgcgtgaatatttttagacattttcatcgttttcccatcggagtcataatattgaaggcaatagtgaaatcattgagcgccctcagaaagcattgcggaacgattattaagggaggggaagtgcgatgtaaaatcactttagttgcttaataatgaagggaaatgacttagccataatccccgtattttgagtcgttatttagccctgtttttagatgccgacctgatgttctaaatccgtaattttctgctgaatttcgatagaagcatttcccccaggctttatgatgatccgtattgataccgtcgtcgcactgatgcgaccggctctttttattacaaggaagtaccctgatgttgtcctcaatccactttcctgttcgttcttatagccttgaggctctacagccggatgcgggtgcaaagtcagcgacgctgatgttggtgaaatatgaaaaatcaccgcctaaggatgagcaaaaaggaccagaaaaagcaccggggggagagatacctcaaggtactgcccgttcatttggcgcattaaaagaaatagaacagggcaagctgaatagtgcggagtttgttatggataatttaaaactggacaagcgcggtttgttatctctgcccgtgctgttaaacacttcggataatgcagaaagagcctcgacaaagcaggaaagaagtagcatcaagaaactcagtggccatttaattaagcacattgccgtaaagcacgcgagtaaaaataaaatttctcttaaggagtcggtgaaaattattcggcatcagtttgcacaagctggaacacaactgcgcaatgacaaggcgtggaatacgcttaataatacggtctcacacaatcaatctcattacgcctgcacgctggtgcccgcgtcgaatatgaaattaggcgccgatgatatctttgtgcaaagttatgcgggaaaaggcgtctgtagctcatcgacctccgaggcgaagcacgcggtcaatctctggtcttccgaaatctcggtccccgacaaagagggaaagccggtgacgttgttcaaagggctgcggcacgccattctttcccctttcgggatgaaaaaatccgatcctacgcgtcaggccggggcactcgcgcgggcaaaagaggtcgcaacggcggccctttacgctaaacctgagttactgaaaagtgcactggcggggcaaacggtgcctctgcaaattgtctccaccgcgttggtgacggcgacgaagataatacacgaagacactatgctggatgaccaaatgaatgcctggcaggcgttaagtaaaacgtcaccggtcagtctttccattcgcggggaaaatggcaagctgcaggaagtaaaagtcaatctgggggtggcggcgttcaacttcggcgttaacgagttagccctcaagtttggtatgggctggtctgcatcagataaacacaatgctaaggcgcttgagcagttgataggcggtaatgcaaaaaccggtgcgccgccgggcggcatggtgggcgcgtaccttaaaagcaatcctgcaaatgccgcaaaagtgcttgaactgacccagcagcttcagcagatcatggccaataacgcgcaccatcgtgatagcggtgaaccttataaagcgccgcagcgtatcgcgatgctggcgtatgaaattggtgccgtaccctgctggaactgcaagagcggtaaggacagaaccggtatgctggacgctgaaataaaacgcgaggcgataagccatcatcagggacaaccgttgagtcaaccgggaaaacctctcgacgcgaataacaaaaagatctttcagcaggtgctgatcggtggcggtaatcatgagattcaggcgcagaacaccagcgcctcgggcaataaagtgttaaaaaacatcccgctcagcgctatcaatttgtcctacgatgcgcgagtcggtgaccaccaggtttggaaagagacccaaggcctgtcaaaactcgtttaagggtgataccgaagatgctaaatattatataccgtctttatgacgcgcttgggctggagattgacggcgacgacccggctttggtgattgataacgatctgaccgtgtattttaacgagtcgggtgaaacgctggaaatgtgttgcccggtgggcgcgcttcctaaggacgtggcaatcctgcatcgtgcactccagttaaattatgccagcccggtgacattagcggcggatgaggaaaatacgctgctgttggccctgatgcgtttcccggaagagtcagctgccgcagaggttgaatcgggtttgcatcagctggtggcagtcactcgtaagatgcgccaacacttgctcccggcagcttattaggtgggcgaggcaatatcgctaatctcgctattcaaagctcaaaatattgttttatctctgcgcatttctgcggttaactctttttggcagcggtactgacaccctcagtagccttagagagtcaccttaaaatcattaacgttcagataatgacatgacgatagcaattattgagggttcaaaagtaaggatattcgtgtctttattttgaatccttttttattgccgccatttcacgcccctgtcagcgtaaaagggaggcgggagcaaaagggactaacgcgtaatatcaatcacgtgtgcatcaatatcagggatttgtttgataagcccctgtttaagataccactgtgcgatattgcggatatgctgcttctcgatgtcgcctatcggcgtgacgggcacggtattaacctcgcccagtccgtcacccaatccttttccaatcggccccatctgctgcgcccaaattgcgcctgcctcgtgaggatgcgcttttgcccaggcattctgctgctgcaatacggcataaaccgttttaatgacctgcggatgctgctgataaaaggcctggctgacgaaatacccagcggcgttttccgatcctaaattatgtccgttgatcagcaatcgcccctgatagtccttgcgcgccagcgtcaggtacgggtcccagattgcccaggcatcgacgtgtcctcccacgaaggcggtgccggtatctgccgggctgagatactccttctgcactgcgttctccgggatgcccgccgtttgcagcgcgcgcgagagcagatattccccggtgccgcctttattgaccgccaccttttttcctttcaggtcctggattgtcttaatcggcgagtcatcgcgaaccacaatcccttcaccgtctgcgggcatggcctggtaggcgaagaacatgagaggtgaaccggcggctatggcggtcacaaaggcggtagagctgccggtcgtcacgtcgagtgcacctgcattcaaggcctcataggcgggagccgccgctgcaaaggggccaagccatttaacttttacatgctctttggcgagcgcacggtcgaggctgccgttttctttagccagcgcgagatcggtagggccgcgcagataggcgatgcgcagctggaggtcttcagcctgcgcggacacggaggtcgccagcagcgccgctaacagggcttttttaaacagtgctttcacaggttgtccttagtgaaaatagataattttttctaaaaaatccgccttaaacagatcggtggcctcaatctgctgttccttgagcaatacgtcatccgcgagcgtaatcccaggatctggcattcagcgcgctgagcagatgttggcggctcaccgagtcagggatatttttatacagaatttctgtcgcctgtgcgatatgagaagctctccacaggtcattctcctgtaaggctttttgcattaatgacgccggttccataaaccgtggagcgcggcagctttggcacacgggttatcatcgatttacccgaggcgtaggacgctcaagccctaagtgtccgcgcagggtatcggcggtgtattctctgcgaaacacgcctctttcctgaagcaggggaaccactttgctgaagaacgcgtccgacgcggcgggcacaaacggcggcatgatgacaaagccgtctaccgcccgttcgcggtaccaggtcgtcatacgctcggccagagaatcggcggtgcctgcaacaataaaacccgagcgcgcgacccatttggcgaaatctcgcagcgtcatgccattattgcgggcgtgattaagcatcggttcaaagcgttcacggcgaccaagcagggcggcgatgtccggcaccaaatcgtcgagatgatgctggccccagtcatagttcatggtgtttgacaagtgagtgagcgtggcaaggggatgatgcagctgggtcagctcggccagaatctcatccgcttccttctgggtatcgcctacgatgggctgtaaacccggtaataccttcaggctgtctgcggcgcgtccgtgttcaactactcgtgacttaaggtcggcatagtatttctgggcagaggcaaggtcggatttctcggcggcaaagatggcgtctgcctcgcgtgcggcaagggcggtaaacggccccgacccgcctgcctgaatggtcaccggatgcccctgcggcgagcgtggtacgttaagcggacctttcaccttgaaccagtcgttatcaatatcggcatagcgaatacgggacccgtctgcatacacgccactttttcgattggcgaggatggcattatcgtcccaggtatcccacagcgtgcggacggcgtgaatgaaggcttcggccttgagatagcgttgctcgtggctcagcagcgtttgcccaaaattgcgcgcctcggcgtcactggttgaggtcaccacgttccaggccgcgcgaccgcccgttaagtggtccagcgtggccaaggttcttgcggcggcaaacggctgaataaaggagctggataccgtgcccgccaggccaattttctccgtcaccgcgccaagcgcagacagcacggaaaatggctctggccgctcggtaatacggtactgcaccgcatcgttaaaactgtcgttgtagatatcgtcaatcgacagtttgtcagccataaataccatatcaaacttggcggcctcggccttgagggttaaggccttgagtaccgaccattctgaggcggccggaacgggattcgctgcgggaatacgccagccggaatagtggcagccggtagggtcgagaaacagcgcgagatgcattgaagacatgaggattatccttttaccggcgtcacagtctgggttgatggagtagcggtagggttaatactcaagtcggtgtcaaaccacttctcggatatcttctttaacgtaccgtcagcgcgcagctgctcgagtgcgagattgacctttttacgcaagtcttcaccgcgcgcgttctttttgaaaggcaatgccacctgtttcacgccaaagggcacacccaccaccttgagcggcaaatgcttgtgcttgatttgcccgagtaaaatcacctgtccggacacgtaagcgtcaaccttaccctgtgcaacggcgttgaaaatcacgtcttgcccctcgaaggtcaccagatttatctggttttgcggatcaaactctttcaatactttggcataattggatccgagatcggcggcaacggttctgcctttcatgtcctcaagcccgtggatgctctggttatttttgctgaccgccaactgcgctgcgctgtaataatacggcacgctaaagtcatatttctgacgacgctctggggtatcggcaaagttgcccacggtgtcgaccttgccggtctcaagtgaaccgagcacgccgacccagtcagaagtgacccactgaattttatagtgaatcttatcggcgacggcgttgagaatatcaacgctaaagcctttcgcgatcccattctcgataaagtaatgcgggtatccgtctggcgaggtgcctacacgcagcacgggtgggtcatcggcctggccggaggacttatcgcatccgttcagcgtcaggatcgagcaggcaagcagcgccagtgttaacagcctcatggtgggtcccttttattagttgacgtaaggtttattaatttgtttttcgagacgacgctgtaattcgctaagaataatggtcaatccccagtagataaggccgacggcaaaataggcctcgaagtatttaagtgattcggtggcggcaagctttcctgcagccagcagttcgcttacgcctaaggtgaaggccagcgaggagttcttgatcaagccaatatagacgttgccggtggcgggaatggcgttacggcaggcctgaggtaacaagatgcgccatgaggcttggaataggctaaggcctgaggcaagcgacgcttcaagctgaccactatcaacggaatcaatcgcggcacggaaaatttcggccagataagcggaagtattcaggctaagcccgaggatcaccgcattcatcgcgctcatggagttaagggcgggaaatatctgcggtaagccaaaatagataattaacaactgcactaacaccggagtaccgcgaaagaaggagatatacagatgtgcaaagcctgcggcacctttacccgcgcgcagtagcagggcaaaaatgatccccaacgcggtggcgagtaaaatagacagtaaggaaataagcagggtaacgggaagatagctgaggatatggggaataatgctcagcatatatttgacgtcaaaattcatggtgtggcgttccgttggcgaagaataaagtcatgcgaagtcatgcaggaaagtgcgagtacgattctcgagcggtgcgctgagtatctggctcggcttgccctgttcgataatctttccttgctccataaagaagatgcggtcagacacgtcgcgcgcaaaactcatctcgtgggtcacaatcatcatggttagatttttgtctgccagaccagcaatcaggttaagaatttcgcgtcgcatttccgggtcaagagaagaggttggctcgtcaaacagaatcacctgaggattgacgctcaacgctctggcaatgccaacgcgctgttgctgcccgccggagagcgtagaagggtaggcatcggccttgtgggccagtcccacctgtgagagcaacgccatgccacgctcgcgtgcctgagacttaggcagacgctgggtacaaatcaacacttcggtgatgttctccagcgcggtcttatttttgaaaaggttgtagtgttgaaataccatcgaggtctgacgacggaagtcggcaatttgacggtgatgcagtgcgtcggcatttatttgctggccgccaatctgaataattccgctgtctggttttaccaacagatttaatgaacgcagaagcgtcgatttaccggatccggaaggcccaataacagataccacttcgctgcgcttaatggtgaaattaacgtctgacagtgcggcgaattgatgaaaacttttgttaagcccgctgacattaatcatgacatcgcccatgatttctccaatgaattaacgtttgctaatcaaaggattattatctgctcacgcattaactacaaatgcttaaaatggctattgttatgtggattctaataaaaaagggggagaaatgccgccaagtagcggcattttgatgaggaggaaattaagcggtaaccgcgtgtttaacgactctgacaggtaaggacttataggaaggcgtgccgctttccttatcgatatagtcaagcgggatcaatacattggcctcaggataataggccccactgaaccttccgagatgttataggcgatcaccgtaatgttctccagacgcagcttactgccttgtactgcggtttcgatatccaccaggtcaccgtgctccagcccgcgcttctcaaggtcggtgtcgctcataaacagaatatcgcgacggccaaacacgccgcgataacggtcgtcgagcgcatatatcgtggtgttgtattggtcatgactgcgtaaggtaatcatgcgcaacacgtcttctccttcaacgaccagatcttcggtaacgccgtcgaacaccgagaatatcgccttgccggtcggggtaggccatttacgctcggtaggcggcagcggcatacggaatccaccgggatagctatccgctcattgtatttatcaaagcccggaatagttttctcaatcaggtctcgaattatgctgtagtcggcaaccagctccatccaaggcaccttggtatgagggattgttgccttcgccatacgaccgacgatatccggctcagaaagtaaaaactctgaagcgggtttcaacttacccgaggaggcatggaccattgacatcgagtcctcgacggtaatcgcctggcgaccactggcctgtaggtccaattcggtacgacccaagcagggaacacataggtttccttagcaaccagaagatgcgagcggttgagcttagttcccacgtgaacgctcaggtctaaggctttcattgccgggaaacatttctcaggatccggcaacgcgacagcaaagttaccgcccagacaaatcagtgctttggatctaccctcggccatggcttccatcgcttttactgcgtcgtgaccatgctctttcggcggcacaaagccaaacaccttctcgagattttccaggaaggcggccgacggtttttcagtaatgccgaccgtacggtttccctgcacgttcgaatgcccgcgcagagggcatatcccgcacccggtttaccgaagttaccgcgtaacaacagaagatcggcaatcaggcgaacgttggcggtccctttgttgtgctgagtcacgcccatgccgtaagtgacgatcgtggcctttgatttggcatagagcgtggcaacctgtgtaagactttcgcgtgtcaggccggactctttctcgatatcatcccaggatgttgaggccatatctgcggcaaacacctcgaatccctgggtatgttcggcaataaaatcgttgtccagcaggttaccctcagaatcgttcagctcgagcagtgctttcatgatgcctttcagcgcggctgcgtcaccgcccgcttttacctgatagtaggtcgaagcaatgttggtggaggtgtaggttgccatctcgatgacgttctgtggatcggcaaaacgctccagggcgcgctcacgcagcggattaaagactatgatagggacgttgcggcgcgcaacttcgtgcagcgtccccatcatacggggatggttggtgccggggttgtggccaatggagataatgagctcggtgtcatcgaaatcgtccagtgaaacggtccctttaccgataccaatagactgcggcaggccgacgctggtggcctcatgacacatgttggaacagtcggggaagttgttggtgccaaactcgcgggcaaacagctggaacaaatacgcggcttcatttgaggcgcggccggaagtatagaattcaacttcatcgggcgagtcaacgttttgcaagatttctgcaatgcggctaaaggcggtttcccattcaaccggctgtagcgtatccgtttccttattataaaccagcgggtgggttaatcgtccgtagccctcaagctcgaagtctgatttctgcagtagcgaggtcacggtgtttgccgccaaaaattctggcgtgacgcgtttgctggtggcctcccaggtgaccgccttggcgccgttttcacagaactggaaggtcgagtttttttctttgtctggccatgcgcagccggggcagtcgaatccgtccggctggttggtgcgcagcaaggttgctggcgcggtcaggttatccatctgagtgcggaccgcaatcgccgtggctttcagtgcaccccaaccgcccgccgggccgtcataggggtgaacgccgggaaccgaacgtctttgtttagtcatgaaaactcctgggcaggataagcattgagggattgcgtaaaatcaccccgtaaaagataagtgtaatcagtgccagagaagttatgtttgattgatgttagaattttgtaagttttttttaatgattctattcagggagttaaaagagcaaggggaatgctcattcactcatttttcattgagactgaaaccgaggatgaaaagggtaacgatctcaggagccaataataagctagcctgacaaatgtcggcacgcttgccataatgatcagactgttataggaaggttattcgaaataggacgagggtgctgatatggattttaaaatggcagagcaggaggacggagagcggcttgctgaaatacgggcagcagcaatgaggcctagcctggaagccgtcgggcggtttgatgaacaacgagtcagaaaccgttttcttgatacattcttgccgatgaacaccttcaaaattgaaagtcagggcagtctagcgggattctttgtcatcacggataaaatggaccatctctatttggatcatttgtacattcatcctgattatcagaatcatcaactgggcagagcggctatcgaacaggtcatcaagacggcaagagagcgcacattgcctctgcggttgggtgcattacgtggaagtcggtctaaccggttctacatcaatcatgggtttatcaaaacgcatgaggatgaattcgatatttattatgaacttagggcataagatgaaggctccttgatggagcctcttttataacctttaattagttacaacattcaatagcccttaaataaagcgatgaaacttcacctacggtattcgtacttagcgtaggatctgtacttaataattaaaagcttgatagcgattagaggtgattaccctttgtattctcttaataaggaaaaagaggaaaattcaccacgctttctctgggacattttttcttcaggaatttcataaactgcaaaatcgccggcttttctttgcatacccggcagcatatttcgtttcatatgttgatcatcagacgtatcaacgtctccattgggcagtattgttacctgacctcccgggcctctgtagtgcacgaaatcacttctgaccagataagtattgccatccattccgtccattggaaccttaactgcgctggatgttactctaattttcaccttttcatggctcttgttgccggttaaatgattaataatatctgattcaaacggcgtatattttgcctctatgaggcgggtctcccctgaaacatattgcttattgagaccagaagagtccctataggaaaaaccatattgccaaggtagggagggtgtatgttcctttgcggcatatacagtgcagggctgcaaaacggtattggctatattcaacatttttctggcaaaatttgactgattcacatttccatctggaacagcatttctgcataccaaaagagaaagctgcctgactacctctaaaaacatatgttctccctcattaaacatttaattaaccagggcaaatttatgtcagatcacgttgagaaatctattcatttgcgctcgaattaaaccttcaatcctgtattgaataaatttttcatagcggaagccttacgaggctcaacctcaccagaaaatgaaacgtaatagggcgtttagcggcaacgctcagtaaaatctgtgcctcatagaggccaggatttttcagaattcacgtagcgacgcctgttttataggcaaaaaaatccggtagcagagccaaagccctgactaccggatgatgcatcaaggcgtcattaccaggccttgatggcatcgcctttatacacttcttcggctttttccgcgacttctggagtctggaaagcttctttcagttcctgcatttttttgctgtttttgttgtcttcacgagaaaccagtgcgttgacatatggagacgccgcgtcttccataaacaggccgttacggcgtggagacagacccacctgtgaggagaagttggtgttgatgatagacagagtgacgttaggatcgtccagagtacgcgtcagctgcggcgtatccacctcaacaatattcagttttttcggattgtcgatgatgtccagcgtcgttggcaagtagcctacgccagctttcagcttgattaaaccttgtgcctggagcagcagcaggctgcggcccagcgtagtcgcttcgttagagatagtcaccgttgcgccatccggcaggtctttaacgtttttaattttcttcgagtaagccgcaatcgggaaaataaaggttttggtcaggatagcgaagtgatagccgcgctctttagactgcgcttcgagataaggcaggctttggaaggcgttggcatcaacgtccttgctgttcagagattcgttcggcagaacatagtcgttgaaaggaatgacctcaacgtcaagattatatttctctttggcaactttctgcacttcctgccaaattgcctgatcgggaccggtattgatggcaacttttactttattatcatcaccttgtttacaagcggacagcatcaagacagaggtggcgatcagagcggacaacagcaatttcttcataaatacgcttctcttaataattaaaacttataaaacaatattacggcgacattactatacagaggttgccaaggcgttagccattgatatgtagtgaaatctcttcatcatggcgaaatagtcaacacaaactattgtaaacaagccataggataaacttatgaaaaaaggaataagggcagggtgaagagagtttcctgacaggctcccgtaaagggagccaggatgatgcattttaagcagtgcagcagagattgttaaccaatccagagaacaacgcaggcggcaaaaatacagtaacccccaaaaagatgccatttaccgtgctcaagccagcccgcaagccagcgcagtgccagtaaaccagcaataaagctgaaaaccattcccatcaaacttggcaagaggattgaagacagggtcaatgaagcatgagttgcggcattatcgtggaacacacggacgacttctttaatgataacaactggcgtcaaaacaacggccaaggcaaagctgaactcttcagccgttttacgcgcaacaccgagggataatgcggtagaaattgttgcgcctgagcgtgagaacccacggaaaggcaggcaaagaccttgaacgataccaatggttaacgattgaaaaggggaaaggtttgtagcatgactttctttgattcttgaagagacaatgatcagtatgcccgcagccacaagcccgaagcaatcagcttgctgttgctaaacaatgattcgatttcaaaggtagaagcgttgccggcgtaaaacaccttgatgatatgctgcaacgtcagccctacaacaccggtcatcatagtagccagaatgatgtgcagggcgttacgtttaaaggcggcgccagagctaaagtacgtatcgcgccaggatttccagaaatgaacgataacggcgaacatggtacccgtgtgtagcataaccaacagcaacgtcatgtcaggcgcgctgggatcaagccccagaattttctctgccataatgacgtgagccgaactggatacgggcaacagttcggctagcccctgaatgactgccaaaatcagtatgttcaaaaatgtcatattttctccgggttaaataatcccatcagttaacactcaggttaaacacgtggtcgagatggccatactgaatccacccatcactgcgcccgtgccgagaataactatagtccttagttgttgtatttttaatgtttatataaagcgctaaatcgaagagagggttttgtttaacctttgtttattttttataaagccacgctgacttcgtcctaacacaataatatgaaagaaaaatgacgggcggttaacaacggcgtttctggtagcgtgttagaagaagtagggcacgtagagttgaataaaacttattgttacgttataacataactacattacaaagtgataaggattcagtcttcgtggttaaatttcaaaaagttgcagtatttctgggaatgctcatcgcaagtggtcatgcttttgctcacggcaatcattcacacggtgcgcccatgacagcgggggaagagcaagcggctatgggtatttttaaagataaaaatgtgaaagacagagtacttaaggattgggatgggctgtggcaatccgtttatccgtatctgctaagcggggaacttgacccagttttccaaaagaaggccgaacaggataagggtaaaacgcccgcagaagttaaggcctattaccgcaaaggctatgcgacccacgttgataccattggcattgaggacggtgttatagagtttcatcgcggtaaacaggttgcgtcctgtaaatatgattatgccgggcacaagattttaacttacccatccggtaagaaaggtgtgcgctatctgtttgaatgccacgacgctaccagcaaggcacccaaatacgttcagttcagcgatcacattattgcaccgcgtcgctccagtcatttccatatgttcatcggaaatgtttcacagcaggcgcttctggaagagatggacaactggccgacttattaccgccttaatttggatgcagcacagattgtcgacgaaatgctgcatcactaaataagcaaaggtaagcaacatatccgctaaggataaatattaatctccagcagtacccgatattgactgctggagattaattcgcccctggtgaggcaaggttatcttttctttctgattatcgtattaccctcaaaaagagttattgatttgtactgatggctaattcaacgattaggtcattttttttatttaatggtaaccataatttattacggtagccgctaccattaataatttcaatatcaccactttctttcatttcgcctgcacgtaaatagcttgatttcttattgttaattacctctgccagtttactgggccatccataactgtttaaatcagcaccctgatttgtgaaggtaaattgctcgacaaccttgccggttgacttacttttaactatcgccgttgccgttgagtgagcgggaaggccatcaccaccgctaatattactggtgtctgaccacttcacaccattatatagagcatatgttttgcgattcacttcaagatgataggcatctttcttaccaaggttcaaccatatgctgtttcgataaccagaaccaacaacaggtgatattctccctttgaaaaactctccagccctaatgatctctgctgggaaaaagtcattcactgcgatagagacctcataaggccagctatattcccccggattactgattactttatcaagcactaatttttcatttttgtttatatctttcaggacaacttcaaaaaattgacgagggggtaaaattcctgtgttaaggggatgtttattttcccagtcaggaaagttgttagcgacaataaagcgtctttcattgatcaggcgcactgcatcattactgctcactgtacctatagggtcgccattaaatttcaactgtgggttcgagaagaaattgattgctgtaccacccgttgtacgttttgacataatagtactaaatttacctgcaacacgataaccattagcataggcagttatgccttgttctttttcaccatgattaagtccaaaattatggccgatttcatgcgctagtgtattattggatattgcctgattagcactgaccacgctatgcattccggacctataagccagccctccgccgagttcggatattaaaacaatcagatctgcctgggtttctttttgcttttgagctattccagcacccaagggcgtgtttttatttttcatattagaaagcagactattcatgttagtctcagttacattagtgtcaagcgtgcctgccacatcaaatctagctaatgaattacttcttacgtgacttgaatttaatgaggtatttaatgtgcttgcatacaattcaggactattgccaaatttatagcgcgactgattggtataagcatacaacactcttattttggcgatctcattactggattgctcatcgtgctcccataaaccgggctcaacgctatcatcttggatatagtcaaattcattttcatcaccgcccgccgtctcgattcttaccagcgcatgtaactcttctgatatcggatgaatttcataagctgaatgatcacttaatttaacaaaaccacttactttgttattttttatagaaaaaaccgcagtgcttttatcatccacagaatgaccttgccataccttgatgtcgtcactctcttcttttaatgtgcttctattaatttctatagtctgatgctgattatcgttgttgaacaagaaggatgtcgcgccgttaaggagaacgtctttatttattttaatcaattgaacgctttggtctttgcctttaaattcatgcaatagattattactatacgtagggtcttcatcaaccattttaaagagtggcgcagcggcatagagtgagggtgaaaatgtagacacagcaatcgaaaatattaatgcttttctaaaacccaacatgttgcaacatccttatgtgataaaaataacttttaaaatttattagaacagggtgcggatataaacccgacataaacaaacttcaaatgtatataccattttataaagcgagatttatctataagtatttaagagattgctgtgtaaagcaggagttgtggaaatcagccaccggtgaatgaaaaataaaacacgaaaatcaaagctagcggactgacgctgctgaccgcgaccatcactctgtggaataaggtgtaaagagaaaggaggattgacgcattaaaacgtaagagagcgaagttgaacaagccgctgctgccgcattggtccgcattggtccgcgttaggctgggagcctatcaatctgactggcggttataattttcgatatacaaactgatcccttggagcccgtgattcattgataggcttaaaaccaggagcgagggcagtgggatgcctgatatggctatgaggtggatggtggtgtgcagaaggtaaattcctaagtgactaccatatcacatttaacataatatacattatgcgcaccaaggtatcggtacgtcgattctgagcttttgggctttagctcgaccttgttttcaattattagcttttggggattatcaatcctttgctatttgctgccggcgttccctgatgaaatctcatctgccagcgtccacttttttcattgagcttccagatcgacgaccgcaatgtttgccgtgttacgtttcctacgtggtcgcgggtaaaactttcgtaagtcagcaacgtcacccgatcctctagaagactacatttaaaattgctggccactatttctagccgctcagtttcctgcagtaaactttctatcacctcctgcctgacatacacctttccagagcgacctatctccgtgaacgccgggtgcagcaaatcctcgagcatactggcatcgctgcgaattccaggctgatggagcttcctttcgagtgtgattagccgctgagttaatatatcgagttccatctttactcctaaaagatcgcgctacgtgaaatctgagtactttgcggccccaatttcccgtaatgatggcgagagagataggattataatagaagttgtcgtatcgggattatcggtggcgcgcaagggaattctccccttgcgctctgtcaggaagattttataaccctactctgccgacgttggcgttgtggtcgtcgttgatgaagacgcggctgctggcgtggtcgttgaagtcgatgaagacgtcgtggacgaatctgttggcgtcgtcgccgtggacgaagaagatgttgaagacgctgcaggtgcggttactgaggttgaccccgtcgaggccggcgtagttgttgtggtcgaagcagcggccggagttgtcgtggccgaagtagacgctggcgtggtcgctgaagttgctggcgttgctgaagttgctggcgttgacgtcgaagttgctgccggtgtcacaatcgaggctggcaccgcaggaacccccgttgccgctggagtcgctggagcagcaggcgtcgcagccggagccggtgttggagtcggggctggcgtatcgaaaatcaccttggtggcaggacgcactttgaacgatggcgtcgtatccgtcacggagtaattgatatgctgttcgtatttcgtcgtggtagtcacctcaaccgcagggatagtcacacgacccaccattgaacgtgcgtagccccgattttgtgcttgccggcattgacgtgcagttcaacggtttgacccagggccagaataccggcgtctacaccgtcaaccgtcacgtaaattggtgcaccgtcatcagccaactctctaagatgagtcacagtcactaccgtcggtccggtagaaaaatccgttgcctgaggcttggccggagttaaggctgaggcagcggccgaggtggctgctgaggtagctgcggtaatctttgcgcagccggtcagcgcaaaagctgtcgtgacagcaatcagggtgaaacggttaatcatgttgcgacgtcttcctatcgtggttttgtgacttgtgcaccaatataacctatctcgggatcgagatgaatatcagcttaattttcttacacaaaactcgcagcgattgctaatttatattggggtgaacggcagcgaaatgaaacatgaaggcatctctcctgtgagaagttaccggtagtggtgtgacagagtgacagtgtcacgctatgtgcggccattgcatggcaccgtacggccaaggatatggcaacgcaggagcaaatgggcttttatgagggatggaaaatcgtcgttgattaactcgaagatatgctaacagtctgaaaaaatgactttatatagaagaggccccgagcggagcctcttgataagcctgttttaaagagctaaatcgaccacgatgcgcccttcaattttgcctgcatgcatacgggcaaaaatatcgttaatattgctgagaggttcaaccgcaatattcgccgccactttatgacgaccggcaaaatctaacgcctcctgcagatctttacgtgtacctacaatcgagccgcggacggtgatgccgtcaagtaccatattgaagattgacagatcaaaggtgcccggaggcaggccgtttaagaccatcgtcccccacggcgcagggtgccaatggcttgctcgaacgctttaggcgagacggcggtcacgagaacgccgtgtgcaccgccgaaactttcgtggaacactgttgctggatccacgtttttcgcgttggcgaccacggttgcccccagtcgcctggcaaaagccaacttgtcatcatcaatatcgaccgccgcgacgttcaggcccatggcgaccgcatattgaatcgccatgtggcccagcccgccaattcccgagataaccacccagtcgcccggcttggtttcggtcattttaagacctttatagaccgtgacacctgcgcagaggatcggtgcaatttcgttatagcccacgttatcgggcaagatacccacgtagtttgcatcggccaaacagtactcagcaaagctgccgttaacggaataaccggcgttttgctgcgaatggcatagggtctcccagttgtccagacagtgttcgcagtggccacaggcggaatataaccagggcactcccacgcgatcccctcttttacgtgctttacgccctcacctacggcaaccacatacccaacccttcatgaccaggaataaacggtggctgcggtttaaccggccagtcgccctccgcagcgtgtagatccgtgtgacaaacaccggtggcaacaatttttactaacagttgccccgctccaacttcggggatcgggacttgttcaataaccaaaggttcaccaaaggctttcactactgcggctttcatcgttttcatcttgtcactccatcaaggaaacaggcttaaaacagacctaaaggcgccgtgtcatagctgaccagcaaattcttggtttgttgatacgcggtgagtgccattttgtgcgtctcgcgtcccacacctgactgtttgtagccaccgaatgccgcgtgtgccggataaatgtgatagcagttggtccatacacgaccggccttgatagcacgtcccatgcgatacgcgaggttggtgtctcgtgtccagatcccggcaccgagaccaaactgagtctcgttggcgatcgccaatgcttcagcctcgtctttaaaggtggtgacgccgatgacaggtccaaaaatttcttcctggaagctgcgcatttggttggtgcctttaatcagcgttggctggatgtagaaaccgttatcaaactccggagcgatgctagcgcgagctcccccgacgagaatctgccctccttcgtcgcgggcaatatcgatataggaaaggattttatcgtactgctggcgtgaagcctgtgcaccgatcatggtgtcagtgtccaggggatcaccacggtgaatgttggcaatttttgccatgacgcgttccatgaatggcgcataaatagattcatggataagcgcgcgtgaaggacaggtacagacttcgccctgattgaagaagcccagcactaagccttcgaccgccttttcaatgaattcaggctcggcgttcatgatgtcggcgaagtagatgttcggcgatttaccgcccaactctacggtgcacgggataatattctctgccgcgcaggccatgatgtggcggccaacaggggtggaacccgtaaaggcaattttggcgatacgcttgctggttgccagggcttcacccgcctctttaccatagccttggaccacgttgagcacgccagccgggaagagatcgccaatcaactcaagcagcaacgtaatgcttagcggcgtctgctctgccggtttcaggaccacacagttacctgcagccagcgccggggcaagtttccaggcggccatcagcagtgggaagttccagggaataatttggccgacaacgccaagaggttcatggaaatggtaggccacagttttttcgtcaatctctgccgcactgccttcctgcgcacgcagacaacctgcgaaatagcggaaatgatcggccgccagcggcaggtcagcgttcagggtttcgcgaaccggcttaccgttgtcccagctttctgccaccgccaggtattcaaggttttcttcaatacgcgaagcgacctgtaacagcaggttggaacgatgttgagcgctggttttgccccaggcgtcggccgctttatgcgccgcatccaacgctgcatcaatatctcgcgcatcggaacgcgggaattggccgatgtcgctgccatcaactggggaggtattcatgaaatattgaccgctaagcggttctacgaatttgccatcaatatagttaccgtaggcggctctgagtgagaataaagcgcctgttgttccgggatgtgcataacgcatcgcaaactccttatgtaggttacggctatcagagataggcaaccgccacagcaaactctgaatgggcggcatacggttgcctaagttacattgcaggcgccgtgccaatctttcactttacgacttttagtaaaatatttttatttattagatatttaaaataacccaagccgcatgtacttctctgctgtcacctaaattctcgttatgtgttgcaaatcgcaacacttgcaaaaccaaattactacaataatgcaacacatattaatgggcttgaggttaccaatgcagggaaattcgtcagccactccccctccgcgacagcacctaatttagtactgagtgactcctggtttcgcagcgagctttatggcctggaccgcacggcggacgactttccacgcatccgtcaaagcgagctcgccgacctgctcgccaataacgcggcgctgcaacagtttgcacggcctgccattaaggcactggccgagaaaattgccgaaaaacagtcggtggttgttctttctgatgccactgggatggtattgaattcgtttggtgatatgcaggcattgcaaaaagcccagcgttttgcgctcgcccccggtaatttatggagcgaatgcggccggggaaccaacgccatcggcactgcattggccattgacggtggctgtgaaatctacggccatcagcactatctcactagcaatcaaggactttactgtgcggcgacgacgctgcaaacgccaaacggacaaattgccggcgtgctggatatttctgggccagcgcagtatccacatccccataccctggcatgggtgaaagaagcggcaaagcacatcgaatatctgtggatgaaacagagcctgaatcctgaccagtggctgatgagtctgcatccgcagatcaatggtcttgataacgttgaggaaatgctgctgatattttcagataacgtgttgatggctgccaatcgcgcagcgatgcatgagctggctctggacatcaccgacttcggtagccaaaccttccagcagcttttcccgcagactgaacagcaggccaatagcgtgccgctgcccatcacctcccgtcatcaacagcgctacttccaacgcctgcgtgctccggcgcgtagccatttcccatcggcgtctgtccctgagagtgacctcttcctcgcgcttcgtggcaacgccgacaaaatggtgcgcctgctcaacgcgggcgtatcgctctgcattcagggtgagaccggcagcggcaaagagtatgtcagtcgggctttgcatcagcagagtcgctggaaagcagggaaatttgtcgccattaattgtgcggccattccggaatcgctgattgagtccgagctcttcggctatcagccaggtgccttcaccggcgcgagcaagaatggctacattggaaaaattcgtgaggctgacggcggcgtgctgtttttggatgagataggtgatatgccactttcgcttcagacacgtttgctgagagtgcttcaggagaaagaggttgcgccgctgggttcggcacgcagctggccggtaagtttcgccgtaatttgtgcgacacaccgcaatcttcttcagcgggttgccgacggcggattccgtgaggacctgctgtaccgtttacaggaattctcgatgactattccgccgctgcgcgagtggccggcccttcccgcctttatcgcccagctctggcgagaactgggcggcgaaaagcgcggcatcgttttatcacccgcgcttatcgaaatgctggtgaaaaaccgctggccgggaaacgtgcgtcagctgcggagtttaatgaaagtgttgcttgcgctggcggatgacaattcagtactcggctgtgactccttgcctgaaaactatcagcttgaggtcagtaaacctgttcctgcactacacgagcatgacgatcggctcattgacgaaacgttgaggcgttttaatggcaacatcagcaaggcggcacaggctttagggattgcacgcagcacgctttatcggcgtgccgcgcggcgttaatattttctatgtccgggcgcctaaatcagaattcgacgtcctcgaggctgaagtattcggtctggtcattgtaggaaaatatctcggcatatcggccccagttaacgaccgtatccaacgtctccttggcggcaccgtctgacaggaagtcttcaagctcctgctcgaagcgaacgcgtggcgcgcgatgtcctgggcgatcgtcaagcacggttttaatcagcgccgccagcggcacaaaacgcagcagatgttctgcaaacatcactttgcgctgctgggtgtcgatatcagcaaaaatacgcgcctgcggcgtcaggaaaatgtccccttcacgcacatcggcaaagcccagcgattgcagaacttcggcgattgggaatagatcgtcgacctcaagatgcaaagtacgcgctatgtctggcatatcagcacggccaaagtaaggctcacccgccaacgtctcaatcagacccgcaatcaggttagtagaaacgtgcggcagtcgcgtgccgagttttagcccttttttcaccgtttcactgttgggacgtgcggtcattttggcgtacacgtcatcaaccagacggcggaactgtgggtccagtcgattgcgtggatgtgggaatggcaccttgatttcggcaatgacgcgaccaggattcgatgacaacactagaatacggtcacacataaacaccgcctcctcgatgttgtgtgtcactatcagtatcgacttgatgggcatctgccccttattccacaggtcgagcaaatcggtacgcagcgtctcggcggtcaatacgtccagcgcagagaaaggttcgtccatcagcagcaaggtcgggtcaacgactagcgcacgagcaaagccgactcgctgcctcattccgcccgaaagctcacgcgggtaggcgttctcaaagccgtcgagaccgataaggtcgatggccgccaacgcacgttttctgcgctctccggcggcaacgcccagcgcctctagcccggcttctacgttttgtaacacggtcaaccaggggaaaagcgcaaaggtctgaaacaccattgcaacgccctgcgctggcccgttcagcggttgcccaagatagtcgacgttacccgaacttggggtgatcaggccggaaataatccgcagcagcgtcgacttccctgatccagaacgccccaacagcccgacaatctcaccttcgcgcagcgtgagattaacatcatccagaatcaacacttcgccgtgggttttatcatacccgtgattcacgtttttcaccgcgaggatctctttacgccttccgctttagtatgctgagcgccagcgttcaacgtattttgattgtcttgcataaaaacggtccttaatctgcacggaatctggattcggcgtaagcatatagaggccgccacagcagcctgttaaacagggtaacgaacagtgccatgacggcaatgccgaggataattttcgggaagtcgcccgccgccgtggtctgtgcaatgtaggcacccagcccatgcgccgtcactttggtgtcgccccactgtacaagctcagagacgatactggcgttccacgcaccgcctgaagccgtgattgcacccgtgatgtagtatgggaaaatacccggcagcatgacctgtttccaccattgccaaccgcggatatggaaattagccgccgcttcacggtaatcattcggaaatgccgtggttcctgccaccacgttgaacaggatataccactgggttcccaatactatcagcggtgacagccagatatccgggttgaggtggaaatggacgataacgataacaaacgccgggaacagcaggtttgccgggaaggccgccagaaactgggcaataggctggattttacctgccagccccggacgcagcccaatcattacgccaagcggcacccaaataattgacgaaataaaaataagcaccgttaccctgagcagggttatcaggcccagaaccagcacatgccccacgtcgccgagcgtgactccggtttgtacataggagatgacccgataggcaacataaacggtgagcagaataaccagcaaactccagacaatatcgccccagcgggaaaggcgtttctgttcgatttctggacggtgcgctctgaaagtcggtaaacgcagcggaatacgtgcaatcagggagagcaacagccctatcggtgataagagctggtgaatgagtcgagtctgccgcatcaagtcgagcacccaggaggtcggtgcgtcgctggagcgggtattctccatgcgaaatttatcggcccaggcaaccagcggcctgaacagcagctgatcgtaggccagaatcaccacggtcattgtcaacaacacccagccaacggcatgaatattcttgtttaaaatcgcttcggcaagatagccgcctattcccggtaaggtaaaggtgttgttaccgacggtgatcgcttcggaggccacgatgaaaaaccagccacctgacattgacatcatcatgttccaaatcagcccgggtacggcgaacggcacatccagcttccagaaacgctgccacgccgtgaggtggaatccgcgtgaaacctcgaccaaatcacgtggcacggtacgcagcgactggtaaaaactgaaggtcatgttccacgcttgactggtaaacagcgcgaagatagccgcaagctccaccccagaacacggccggggaacagcgcgataaaaaaggtgacggtgaaagaaatatagcccagcaccggcaccgactgcaggatatccaatattggcaccagcactttctcggcacgacgacttttggcggccagcgttccgtagaccaggctaaacagcagcgcagctaccatcgcaaccagcattctcagcgtagtgcgcagcgcatactcgggcaaatttgccggatccagagaaatagcctgcgtctttaggctggtgatgggcaagagtgtttgatgaaaccccaccgctgccatagcaatcaaaccgataatcaaggggaaagcaacgccatcccaggcatttggcaataggcgccaattagcggcgttaacattaaaacggaagttcataaaccctctctttgtatcgtggggtcgaatttgtgcgccattattcaatatacttattaaacagatgctctcaacgaagcactgttcacagtaaatttataaaataagtttaatttagcatgacagcattatgtgactattctgagtatagctaccctttgcgtcaggcacaggataaagactggccataaagacaattaaatcattgaaatggaaactttcgaggtatgcgggatgtcaagtgacaacgtaacggaaaagcaagactcacccggcctgaaaatgctggccttgggtgctttaggcgtggtgtttggggatatcggtactagcccactttataccttaaagaccgtactctttttatcgggcgaagcccctcacctggcgttattcttgggctgctatcattaatattctggacattggtcattgtcacctcgctaaaatatgcgatgttcgccatgagaatggataacaacggtgaaggcggaattatggccttaatgtcgctgctggtgaataaaaacagcaaacggccgctggttattttcgccggaattttcggagccgcgcttatttatggtgatggcgctattactccggcaatttcggtgctctctgcactggaagggataaatatggttctgccggagtcgaaaacggtcattgttgcggcgacggtaattattctggtgacgctattctcgatacaggccatgggcacggcaaaaattggtaagctgttcggccctattatggcgctgtggtttatcgtcattgccgcattgggtatttggggaatcgttcagcaccctgcggttctcgtggcgcttaatcccgcccacggcgtgaaatttctcttctcacacggtatggccagcttcctcgttttaggcggtgttttcctctgcgttaccggtgccgaagcgctctatgccgacatgggacactatggccgtcgtcccatctggcttgcctggttcgggttggtctttcctagcctgttgttgaattatgccggtcaggcggcgctgattctttccggtgcagacgtgactgaaaatatattttatcggctctgtccgccttcactgttagttccgttagttattctcgccacccttgccacaattattgccagtcaggcgattatcagcggtgcgttctcaatgacgcggcaggctattcagctcggatggctaccgaggatgcgaatcaaacagacttcggcagaaagttacggccaaatatatatcggcgtcatcaactggctgttaatggtcgcgacggtatttttaaccgtgtttttccagtcttccgaccggctcgccgccgcctatggtattgccgtttctttcaccatgatcatgaccaccgggctgatatatgtctcgatgcgcgaggtgtggcgctggaatctggtgataagtctgttggtggcaggcgttttctttattgttgatatcagcttcctgggcgcaaacctgattaaaatccttgaagggggttatattccgctgctcatggcggtggcgctctacatcgtcatgatggtctggcatcgcggtgtcgaaactgcatcacgcattattcaggataaaacgcagccggtgagtgaattcctggctgagatagagatgcatcaggtgccacgcgttcctggaactgcggtgtttctgacgcgttcgagcggtactccgaccattatgcgttggcacgtatcgcgcaacggttccttgcacgctcaggtgctggcgctgaatatccatatcgataacgtgccccgcgtctctcccgccgagcggttacaaatatgtaaggttgccccgaacttctggcacatcaaggcgcattatgggtttattgaacaacccgatatttccagcctgttcagcaacagtaaaattcaggaattaaatctggataaagagaacatgaccttttatgtcggacatgaaactattttgcgccgtcaggggaaaggaagaatgcctgcgtggcagcggcatctgttctcattaatggttcgcaacagtgcgcacgtcaccgaccactaccatctgccgagtgaccgggtggtcgaaattagccgccaggtcgcactgtaataaaaaagcccggggatctcccgggctttgagtgacagcgcgtaatacattaatagtccggcggcgcaccggcatcttgttgtggataatctggcggagccccgctgtcgcctggattataatccggtggcgcacccgcatcggatggcgatacctcgtagcctgctggcatcggtactttgtcgcctttcgcatacatacattggatatacacgctgttatagcgctgctgtatgtcgtcgttactttccattgatgagtcattgcccatcgcgctgccgacaagcaggccactgcccgcaccaatcagcgcgccggggccagcgtggccggacgcagcgcccagcaaggcaccgcctgccgcaccgataatcgttcccgcagctgccgtattcacggcactgttgtttgcctgctgtgaggcctgattcagtccgctgcgtgcatagttctggcaggtggaatcgtcggccataaactgctcgtaactcttaccggttcccggcatcgccgtcacattaggaccggtcggcgggctcacacagccggataaaagtacggttcccagcgcgagggcaacgggtgcgaacgcaatgattttcatgttacttgacctcgaatagccgcaatcgaattagggttaattaccgtggtgccagtttctgccaaccggttgggcagcgtggtatctgcgggtaataacctaccgggttgtggcagtaataactggcagaggccggtttttgtacatagacctgggcgccggaggcgtcacgtaaacaaccggtggtgggccataatacggaggcggtccccaatagtaaggatcgggtccccaataagggcctacgccgacgacgacgcgtgggccgccccaaccgccacgataaccgccgtggtgatacggatatgcctgggaaacactgcttgcacctaacccgaccagcagggttgcacaaatcccgaatagtgtgagctttttcatcacagaccctcgaatgcagattagaaaatgattaatagtaatatacgcctgctttcggaaagtgttatcaggtgaaggagtaaaacattcgtaaaattgcggtgtaaataatggagagagtgtttgaaatgatgtcatcttattgaaagtgcccgccgagggctataaaaggcgggcatctgagttttataaacgatttgtttaatatatacaaaccataaacgaagttggatttgtaaattaaaacgtaaataaaatcttcaattaaattccaaatagagcttcctaataaaaaccctgtttatcacgcctgtattttattggctgtcctgccccgtaacgcgccatacggtattgccagcatcatcgacaatcagcaatccacccagcttatccatcgctagtccgactggcaatccgcgcacctgtttctgatcttcggtcaggaaccccgtcacgacaggctttggttgccctaccggcttgccgtccttgaaggcgacatacacgacctgatagccattgagcggtttgcgattccaactgccgtgctcactgataaacgccccgccgcgatactcggccggaaggttggtgccggtatagaaccaaagccccaaggggcgacgtgcgagctgagcgcgtagtccggcctgatggccttctcgaccaaatccgggcgctgcggcctgacccgctggtcaacgtgctggccgtaatagctgtatggccagccatagaaagcgttttcctgcaccgaggtcatataatcagggaccagatcggcaccgatttcatcgcgttcattgactactgcccacagtttgccggtttgcggctcccactgtagcccggtcgggttgcgcagcccgctggcataaatacggctcgcaccggttgccacgtctacctcgagaatatctgcacgacgatattcagcgccgatgccattttccgtaatgttgctgttagaccctacgccgacgtaaagcttgctgccgtctgggctggcaagcagagacttggtccagtgatggttaatcggaccgcccggcagatcggcaacctcagtcggcggttcggttatttgcgtttccccgctctgataggggtatttcaccaggccgtcggcgttggcaacgtaaagttcattgccaatcagctgaacgccaaacggcgagtgcagattttcgaggaaaatatgcttttcccaggtcttgccatcgccattggcatttctgagcagagtaatgcgattaccgccgggcccgcctttacccgaggccttctgtaccatgcccatgatgatttctttcggtttactggtcaccccggcggactgttggcttcgaccaccaaaacatcgccattaggcaacaccgttatttgacgaggatgcataaagccgtcggcaaccttcgcaatttttaggccttctgccacctttggcgtctcagccgttttccacgtagtgccgctcggaacttgcatcggcggcagtaggaaatttttggccgctggcaactcgggattgctccccgtctgcttttcgggggcaattttggccgcatcatcgcagcctgcgagtagcaacggcacagtcagcgctagcacggataacgcaaagcgttttttcattttgcttctccataagctttgcgttggcgcagggcaagctgcaaattggcgataagcagcaacagtaccaccaggctcgaaagcgtgacgcccgctggcaccacggcaaaggcgtcgcggctgtgaataaaggcgttgaaaatcgacaatatgatagctagcgcactggcccagaaatgcagttttaccgccgaactctgcggataagaagtaccgacccacacctgtaccagattaattaaacgcggaataatggcgatcaataagccgaaaacaatcaaccagctggccgcctgagtccaggctatttcgctgctatagatataaataatgtcaaatatccaagcggcagtgaaaaagccgatcggcagcggatcgagaagcgaaacaaaccctacggcaagcgcagaattttgcggtgttatgagggacgtcattcacaagctccttataaaaaataaatcacagcgagaggccggataaacgcgccttcactcagggtgcttgtaaatattagtaaaaattattaatttatgtacgcaagtaataattaaaattaattaattgcgtattggcacgataattatcagcgcttgtagcagcatttttgggagaactttcgctctcccggctttatttagctcacctgtttttcgacgtactcaagcgcggcccgtagcgatttttcattcgggttgttagggagtaagtgaatggactcggtagaatttagcgtgcgtgcaatcagacgagctatctgctcatcgtcatgaatatcaacccgaagttcagccaggctgaccggcaaatccagacgcttgtagagagcaatcagctgagcgaccacctcatactgctccagcaaggcactctgcaccagaatgccataggccaccttggtaccgtgcaggaaggcatcggtttgtggcaaggcggtcagcccgttatgaatcgaatgagccgcagcgatgcgggtaaagcgttcgccaagaccgcccaccagcccgccaccagcaatgatagcgtcgataacgttgataagcgatttgctcagctgatttttactctgcgcctcaagcgctctctcgctttcgttaagtaacacgtctcgaagggtgagcgcggtgtttagacccagctgtgcggtcagcggaagctcagcaggctgcggaaaaagcaccaccgcttcataccatttcgctaaagtatcgccgatgccggcaagcaaatactccttcggcgcctgtaagattatctgcggttcgaccaccaccaaatgattagcgtcattgaatatttcataactcaaggccgtaccttggtcgctataccagaccgacagtggcgtccatgcggcacaggtcgcggcgatagtaggaatagccactacgttaagattcagacgacgcgccaccgccttggcggtatccagcacggcaccgccaccgatgctcgatatattcattttataaatcaaagaaattacgcagcgccttttcaacggcttcaggctgttcttcctgcaggaaatgtccacttttagcaatgaccgtccccttcacgttttcaaagaatggacgtaaaggtgtcgccatatcggcaatcgagccttgttcagcgccgatcgccaaaaccggcgttttcagtttacccaaagatttgaaatgtgcattttgtgccgcagaaaccgacagcgcgcgatagtaagccagacctgcacgaacgcctccgcttttagtgaaggtacgcagatactcattaatatcttcttcgctaaaggcatcaggggcggcggtttttcttctcaggaaccactcaagataaacgcgttcctttccggcaataagcacctcaggcaagtcagggatcgcatggaaagcgaaatgccaggtcctccagcctctttctgtggaatgaggcacggcatcgggtaatgtcactcccggaataccggcatccagaatggccagtttctttatctcgtcaccaaacatggcagcatacggataagcgacccaggccccgacatcatgggcggcaagataatattcagtcacctctaaacgttgcaggagcgaacgcactttagtggccacggattttgtatcgtatccttcaagaggcttgtctgaatcgccctgacccggaagatccggggcaataatccgatagtgttctcctaaagcaggcataactttgcgccacgaataccagctttctggaaaccctgccagaagaaccaacgtctccccttgtgcgttaccgcccgtcacataatgaatcctgacaccctcgagtgtctcatagtggtgcgtgaatccctctacagcgggagcgattggagaaaggcaagagattgagtttgccgtcattaggtaatcctcgttatttagggaatgatcatttcctaatttagcggcagagtgaccaaaaagccactcttgtgtttctaaataatcagcaagcaacaaacagagtgagtcaggagcggcatctctcctgactcaagaaaggaaaatcaggcttttttattgcggaccatactcagtaaaaccgagtctttatcaacgaaatgatgcttcaacgcagcgagaatatgcaccaccaccagcgcaccggcaaaccaggaaaggtagatgtgcaccggtttggcaatggagactaattgaggattctttgcgaccagtcgcggaatatcgaacagataggcaaccggcacgttatagccgctcccccaactcagcagacatccactgaccgggagaataatcaaaatcagatacagcgtcatatgtgccgcatgcgccgctctcttcataaggggagaaatactgtcaggcagctgcggggccgggtgggtatagcgccaaaagacgcgaataacgatgaggaacaggatcaaagtagcaatattcttatgcagatcgatggtggattcctttgccgggccactgggcataatattggcgcaataaaatccaatcgcccatgcgacaataaagattgtcgccataatccagtgtagtctttgtgccgtcttcgtatagtaagtacccgtgttttctttcatcgagggttccccgtggaggtgagtaatagcaacattagcatgggtattattagggcagatagcaatttgctgtagggaatacgtctgtagacaactgaatttgtaaacaataatgaccaaaatattcgcttaggaacatccatgaaaaacatcaccttctatcgccgctttgaggccgatattcttgccggacgtaaaaccattacgctaagagataaaagcgacgccgattattcacccggtgataaagtcagcgtagcgcgttatgaagacaatcagttcttctgtcacattgtggttaactcggtgacgccggtgctttatgagcatctcgatgacacccacgcccaacaggaaaatatgaccttagacgagctgaaagcggtgatcgccgagatttatcctgggatcaccgaactttataagattgaatttacgctgcaataacccagttaaccgctatgaaggccagcgtgaagcgcggataatcgagcagaaattgcctttatcaaaaccgggctgtttgtcggcaataacatccgccttcacgttaccaaaggttgtctgcggcttgtctttaaccccctgatagaaagcttcgataatgtcttctttgaactgcggggtacggggatgcgccgcaactaccgcctcacgttcttcgtcactgtaccctgcatagttaatccccagtacgtccatctcgacgcccgccgtcaccagcgcaataaccgggtccataaattcgggaatacccggcgtggtgtgaagtgcaatcgcggtccagactttatcaatatctgcctggctaatctgatgctggcgtaaaaagtcgcgcgccgcgttcgccccatcaacttcaaaacgtttgtcacagctacagtggtcgtgggttaagcccatatcgtggaacatacagccgatatacagcagttcgtggtcaacgacgaccccacgctgttgtcctgcaagagcgccccagtaatagacgcggctggagtgattgaacaataattctgattcggtatcacgcacgagttcggttgcctgctgtgccatacggctgtctgggatatgaatgcctttaacgttgagtgtcatgatgtgtcctgcctgtcgggttgaaagtatggaatgacaataaacctcgcgcagctcgtcctcaatcgtactattatgactatataagacattatgacctcctgagacatcggaacaaacgaatgatcaaaaaagtgcagattttggcaattcccggcgttcagctgttggacgtctccggcccgctcgacgttttcgccgaggtgaatcagcagatgggacgcaaaatttatcagctggaggtgctggcaatcgacttgctcaacgtggtgacctcatcgggtatttgtttgctggcgcagaagcggctccaggatgacgccgatgaaactgccgacacgctgcttgtcgccggtgcgccggatattgcgcaatttattccgtcgtctgagctgctcgacaggctccgccagcgcgctttaaacagccgccgttatgggtcggtgtgcaccggcgccctgctgcttgccgcgaccggcctcttggaggggcatcgcgtcactacgcactggtcggtcgccgaggcgtttgcgcaaagttatccgggattcaggtcgatgctgacgctatttacatcgccgaaggccccctgcgcacggcggcaggcgttacctctggattagatctggcattgatgatggtggaggaggatttgggccgtgacgtcgcgaagaccgtcgccgcgcagttggtgatgttctttaaacgcccaggcggccagatgcagtttagccgcatggggcgcacctcgctgagcggccgctcggcgctacaagacctgcaacgttgggcgattggcaatctggaacatccgcactccgtgcagtcgatggccgaacatatgggcgttagcacccgccatctttcacgtctgtttacgcaggagattggcctgacgccgggagaatggctggagcaggagcgcatcaattatgcgcgccatttgctcgagtctgccgagctcacgccaaaacaaattgccgccaaatgcgggtattcaagtatcgatattttgcgccgtgcgttttaccgtcagctgaaggtcagtccggcgcagtaccgcagctactacaaagataaaagacaaaatcgggcttaagcacgatcaccggcggcataggcctcggcggctgatttcagccaggcacagaagatatccgccttgcgattttgcttttgcctgcggagtgtaacgtagctgagtccgctttcgataaacccctgcggcgcaatcaatctccctgatgcaacatcatcggcaaccagtggccacggggcgatagccacacctaaccctgcggttgccgcctccagcataaagtaaaaatgctcaaattcggctgaaccctgctcccctgtttctacgccagcccgttgggcccaatccgcccatgcactcctgcgtgaaacggtatgcagcagcgacgcccccgcaaggacgaccgagggggcatgaaccggaccaaacttctcattaaacagttcgataacctgcacccctatcggccaaggcgctttaccgacgcgaatcgcgacatcgacgttattgccaatcgggtcagacgaggttcccgaagagttcaggcgtacgttaatgccgggatgcgccgcctgaaaatgatgcaggcgcggtatcagccagcgcatggtaaaagtgccgggacaagagacgtctaacgccccttctgcactgtcggcaatctggctaatcgccgtttccatttggtcaaaagcggcggtgagcgcgggcagcaactgacggcctgtttccgtcagtctcggcgcatgtttagacccatcaaacagcggaacgccgagccaagcttctaactgctgcacctgtcgactaatcgcaccgtgagtcacggaaagttcctcggcaccgagttttatcaggcctaaccgcgcggcagcttcgaaagcacggagagaattcagcggtggaagtcgtctggccattgtgactttttctcacttagggttcgtaaagatatcgattaactcccattaaatcaccgcataaattgatatgcaacgcagtgttgagcggatcccgcatcaattgatgagtaaaaaaatcacatagctaagggaatttatcatgatttatctcgccatcgttattctgggaggattcgccgggttcgtcagcggcattattggtaccggcgggtcgattatcctgctgccgattttatcctggaagtttgggccacaggttgcggtgccgatgatggccgtggcctcgattctgagtaacttttcccgggtgattatctggcgtaaggagatagaatggcgcgcctgtttgacttactccgcgttggctgttccgagtgccgtgctcggcgccaatacgctttgggcgctgccgccgaagatatccaatgtctgtatcggggtcttttttctggcgctagtgccgctgatggcatggtcgcgcaggcacaatctgacgctgaacacctggcagttggcgctgtgtgggctggtcgtaggcttcctgaccggtatggtgttctcgaccgggcccatgacggtgcctattttctcaggctttgggctggtcaaacagggcctgatagcaaccgaatccgccgcatcgctgattgttttcctgaccaagacctcaacctttggcgtgctcggcgccctgccgttatcggtggttctgagcggcatttttgtcggcgcgtcgcagatttccggcatctatctcagtaaagggctagtgtcgagaatgcccaccaaaatctttcaccttctggtgtcgataatgatgcttgccgcaggcgcatcgatgttgtgggacggcgtgatttaaaaagacagcgcgtgacgtcggaaacagtccgggtggtggctattgatgattccggtcgcttccatccaggcatagacgatgaccgggccaacgaagctgaagccgcgctgtttaagctcttttgaaatttgctctgaaagtgtactgcgagtgggaatggggcctgtatgttgaatcggtgcgcccccaacgtgagaccaaatccactgcgaaaaatcctctcctttttcctgcatgcgtaaataggcgtgggcattcttcaccaccgcttttatcttggaacgcgaacgaatgatatcggcattcgccgccagtcgctcaatgtcctcttcggtaaaagccgccaccttctgcggatcaaacccacagaaagcttttctgaacgcctcgcgtttcttgagaatgatacgccacgacagtccggcctgaaaaccgtcgagcatcagcttctcccacagggcgcggctatcaaaaaccggtacacccattcggtatcgtgatactgctgcatcagcgcatcgttatcgccccaggcgcagcgtataaggttggtcacggtttaggctggctcaggcgcgaaggacgataagcctcgagttcagcgaccggcgtacccgctatctcgcgagtgactaaacgcgccagtaaaggtgacagcgtcacaccactgtgcgtcacaacggtgtaataaccggccagcccttcggtcggtcccacaataggatagccgtcctcaggcaaggcgcgaattcccatacgtgcctgatactgctcgggtttcaactcagacagctttggccacaccgccgttgctttgcggataatgtcggctgccagttcactgacccgcgacgctggcgtgctctcgtcaatgtcatagaccccttcgttagggcaaagtagcgtaacgccttcaccgtccggacgacagtggaacagcggcgttgccaatacgtggctgacgggggcgtactcggcaggaacgcggatcagaatgccggtggtcggtgccagtcttgtcgccaggccgtcgttgtaggggacttgtcggaccagcggccgctggcgttgatggtcagctcagcgcggtgcagcgttccgtcagaggtttttacaccggtgacggtattccctcctgcaaaatttcgttcacccggctcccggtcacaatctttgcaccttcggcggcgctggcctgcaacagcagctgaatatattgctgggtatcgatccagccttcggacggaaaccagccgatcgcgccctgggtgccgtcgagatggatttcaggctccagcgcctgaagctgctcggcgctaatccactccgcgggatactgatactgctggagttgctcaacgttatcctgcatcgcctgctgctggtcggcagcgcgccattccagacaaccggtcagattaagccaggggctttacccaagcgcgcggccaattcgctgtgcgcctgcattccggcagcgttaagacgctgataggcttctggcggcttgccgtgggagtttatccaggcaaatgagttggcgctggtgccctttccggcttcacccgcctcaagtaacgtcacagaatggccagcctgcgtcagttcccaggtcagcgatgcaccgaccattcctgcgccaataacgataattttcatcagttctccagaaggttacagtctgcatcacgtgactacaggaaagagtaagtgaatagttaacttaatcaataaagtagccaagcgcgtgcggtggcgcaactgttttatcccagggtaggcaacttggtttttgactcagaggcctgtgggcactgtcattgtcgtgtcataaatcgacattagggtggctgctatcaataaatcccaaagaggatagtcccatgcaattacctgccttctggccggtggtgcgcgcctgtgtgctttacgacggaatctattccgtgcgggaggccaaatgcgcacaccggtaaccgcactccccgccgcgattcgtgttgaacaggtttcacaccgttacgggaccaccacggtgttaaacaacgtctgtctcaaggttcccaaaggaaccattatggcgctgctgggtccttcgggatgcggcaagagcaccctgctaaaattgctcgccgggctgcttcaccctgacagcggtcggctcttttttggcgaacagaaggtggtcgatggccgtttcagcctgccgccggagaagcgcagcctgggcatggtgtttcaggattacgccctctggccgcatatgacggtcggacaaaacgtcatcttcccctacagatgcgcggtgttgccccaaaacagcgccagcaacgcatgctagaagccctggaccgcgtcggattagctgattttcatcatcgccgccctgccgagctttccggggggcagcaacagcgcgtggcgttagcgcgtgccatcgtggccgagccgcaaatcctgctgttcgatgaaccgctttccaatctggaccgtaatttgcgcgaaagcctgtgtgaagaaatggccgttctattgcgccagttgggaacgacggcggtgtatgtcacgcacgatccgcaggaggcggaaaccctggcccactgcattgcgcgaatgaatcagggtgccatcgaacgcatcgacctgctggacggcaatcggcagtcaggcctttcccgtattgatccttttgttgcttaaccctctggtggaaattaaaaaatgacgcatcactcttcttttatcaaaacaggtttactgacggcaatgactctctcttttgctctgaccgccgccagcgcccaggcgttgacggtttatacggccggtcccggttcgctggcgaaaaaactggcggcaggctatgaaaaacagaccggcgttaaagtagaaatctttcaggcgaccacgggcaaagtaatggcccgtctggacgccgagcaggcaaatccgcgcgccgacgtgctgatttctgcctcctgggacaccgcaggcagcctcgaaaaacgcgacgcgttgttggcttatgagagcccgaatgccgcccatgttcccgcacagtttaagacgccctattatgtggcgcagggatatcagcgttggggatagtctggaatacccagagtgggacacccgagccgaaagactggcaggacttggcgcaaccggcctttaaagacaacgtcaccacgccggacccgtcgctctccggcgcatcgctggacttgctcgaaggcctgcaaaatgcccacggcgagcaggcatggaagctgtttgagcagctaaaaaccaacggcatgattattgccggccctaacgcccaggcactgacgccggtgcttcagggcgcgaaagccgccgtatttggcgcagtggactacgtttcctataacagcgtagaggccggagaggccatcaaagtgattttccccgccagcggcaccgttatcgccccgcgtccgatgatgatcctcaagagcagcaaggaaccagcacaggccaaagcctttatcgattatgttctttcacccgagggccagaagctggttgccgatgcctggctgatgccagcgcgcgacgatgtcgatgccaaacgtccgctgtttaaaacgcttaaagtgctgccgacggcgtcaacgggcagcgccgaccgccgtcagctcctcgacaagttcgcgaccctgttcgcggcaaacaactgattcagcgcattaattaccgaccaatgaccggcgactcaactcgccggtcgcgggagtctcaatgaataaaaatacgctgctgccggtatttaccggcggggctctgctgtttctggtcgccgtccccgtcacctttgtgctgctgcaggcgattttccctcatctagaccggggcacgtttaacgcgccttttagcgccttcggcaaactgtttgctgatgcgcaatttcccacgttgctctcgggcaccctgcggcttgggctaggtgttgcgctggccacggcgctcatcggcattccgctgggcacgctgcgcgggctgtttgccctaccgtacgccgcgctgtgggacgccctgttcctgatcccgttccttttcccgccttatctggctgcgctgtcgtggatgctggccctacagtcgcacggctatgtacaacagctgctgggcgtgaatctcaacaacctgctgttctcaatgccgggaatggtgatggtgatgacgatgaacgtattcccggtggtctattttgccatttcacggagcatggcagccagcggcagccgtctggccgatgtcgcacgggtgcacggcgcagggccatggcgagcatttttcaggatttccgtgcccctcgcactgccgtcgacagcctctagtctgctgttggcctttaccctgtcgattgaggagtacggcgtacctgccgccttgggcacacgcagcggcgtggaggtgctaaccaccggcatcgaacaacgccttgccgactggccgattgatatgccgggcgctgccggactgtcggtgatattagtggcgatagcctgttgcgcctactgggtacagcgcgcgttagtcgccggtaaagacgtagaaaccacctccggcaaaccgatagccgtggtacccaagccgctggggcgcgcacgttttctggtattggcgctgttttcgctggtcgcattaacggcggttgggctgccgctggcctcgatttttgtcactgcgtttagccgcactttgtcgggcggccttggcgtcaataatctgacgttagggcattacaaggcgctatttgaccttcagggcgatgccctcggcgcgctcggcaccagtctgagtctggcgttaggcactgcgctggttgttggcgtggtgggcctgctcgctgcctggctggtcgtcgcaaggcggatacgttttgccgcctgcatcgatgcgctatcgcttttccctgcggccctgccgggtatcgttgtcggtgtagggctgatcctcgcctggaatcgcagtttttggcccgtgacccctataacacctggggcattctgctgttggcctactgctgtctgctgctgccgtatccggtacgctacgtcagcgcggccatgcggcagattggtaataatctcgaggcctcggcgcgcgttcacggtgccagtgcggcgcaggcattgcggctgattctgttgccgctggtgtggccaagcctgctggcctcaatgatgatggtctttgccgtcgcctcacgcgagctggtcacgtcgttgctgctggcgccggcaggggtagaaactgtctcggtatttgtctggcggcagtttgagcagggttcggtcggagacggcatggcgatggctagcctggctatcgcgctgaccctgatggtgatgttcctggcggtcagactgcaaaaccgacgactgtactgagccgcagcaacgcgtgaacgttttttttgtcgatttcggttgagggattataaatcactaggctcaggttgggattgccctcaacggcgaatgacgaatagtcgagatggataagccccaccctggcatggttgatgcgtttggtgccctcgccgtggtgactgacgttctggtctaaccacagcgccttgaattcagggctggcggcgttcagctcttcaatcaacgcccgcgatgcgtcggtcatgcccgctctggcgctctcggcccgaaacgttgccaccacgaagctcgcgactttttcccactccggcatcacggcgcgtttactcggacagcagaacaccatgcgcaaaatgttacgctcctcgtaggtcatctcagcatagtcggccagcacaacggacgcggcgcgattccaggcaaccacggtccaatcggcggttttgacaaaagccgggatattctccatcgcatcgagcagccgctggagctgggcggacaccgttgcgggaggttgatgatgcagctgcggtggccgattctgcgccagcaggaacagatactcgcgctcgacgtcagagagcgccagggcgcgtgccagtcgttccagcacgtcgcttgacggcgctccctcgcgcccctgttcgagccaggtgtaccaggtagtgctgacattggcccgcagagccacttcttcccttcgcagccccggcgtgcgcctgcgggtcatcgagaaccccaaactggcagcatcgagccgactgcgccggtccttgagaaaatttcccagcagattttgctctgacatcgtgcctccgtttagcctgttagtggttatacccgtataacgtcacgtctttaatcgaccgccaacgcgcctgtaaagtcggtgtagagttcacgtcgcacacattcatcttaagaggatattatcatgcgcgtatttgtcacgggagcaacaggatttattggttctgccgttgtgcaggaactgttgaacgcgggtcatcaggtgcttggcctggcccgcagcgagtcggcggccgaggcattacaggcggcgggcgctgagcctcatttcggcagccttgacgatttaccgagccttaaacgcggtgcgcaggcggccgatggcgtcattcatacggcctttattcacgacttcactcagtttgccgcctcgtgcgataccgatttaacggcgattcaggccttgggcgacgcgctggaaggaacccataagccgttggtggtcacttcaggaattgcgcttttagcgcagggccaagtcggtaaagagaccgaccttgccagccctgacgcggccggcaagctgcgcgcccgatccgaacaggccgcgctggcgctggctgagcgcggtgtgcgcagttcactggtgcgtctgccgccttcggttcacggcgacggcgaccacgctttcgtgcctgcattgataggcattgccaaaagccacagcgtttccgggtttattggcgacggtaacaaccgctggcccgcggtgcatcgtttcgatgcggccagattatttcgcctggcgctggagcaagccccggcaggcgctatttatcacggcgtgggtgacgaaggcgtgccaacccgcgatatcgctgaactgattggccgcgcgcttaacctgccggtcaagtcgatcaccgccgctgacgccgcggaacatttcggctggctggggcatttctttgcggttgacgttccggcgtcaagtgccatcacacagtcagcgctgggctggtcaccgacccataaatcgctgcgcgaggatctcgagtcaggcagctacttcggctaagaatttttggcggcggcgtcttcgcgccgccactcttttttcaatgatttaatgcggtgacaagcatgtttcgccagtctcagccaggaaacctgccttgggtcgaccagcatgctgagtgcgcgggcatagtctagcgtcaggcccggcgtccaggccatcgttaacgcccgcatcctaatctgtgaggcgacccacagctccggcgtcagcagcagccgcagcatcaccaacggtccaaatcccattgatcgcgcgactgcgccttctatagcggcatccaatgcgcgactgaccgtgctcgaacagttgcgatacgtcaggttgtaggtgtcgtcctgccggtaaagctgccaaaattcactgagtttctcggcattatagtttttgatcatcacctgaatatttgacggacaccactctttggcctcggtttgataatccggcaggaaacgccccgccacgttattctccggcgtggcgcgcagcaatcgggtaaaagaatggctggagcgatcgatttcctccttaggatagaggctgatgtaaatcccttcaggagattccagcgctgaatgcccggtcgaaatcaccccgttggtatcgacggcggcaatataacggtcgactatcatttgacgccgcgcgggggcctttgaactgcccatcggcgtccagatatgcaccgtcaacgccttcaccgaggttgaatgactgtccaggaccaccggggtcttatcgttctcttttccgagtaatttggggccaattatcggattacccatcgccacaaacccaggattcaccatcattcgccgtacatttagcgcaatacgcacaaaattgaggccggcaaagaacaggaacaatcccaggaaatacggcagcgtaccgtgatagttggtcggataaggctggaagaaaaagatcgccagcaggatttcaatcatcccgccaattgccgcggcccgccagcgacgatagcgcaccacccaggcagaggtcagctgcaaaagcccatcggccagaaacaagaaaccaaacagcatcgagaggatgaaatggccgtgataatcgctggctaaaatcagcaccgcgcagataacgaccacggtgcctttcacgtagcgcagcgtcttctgaccgccgactcccgcccaggcgacggcgagggtaaagcagccgtctatcagtaacagccaggcaaaaaaagcgatggggaagttaatcgcgtcgtcaagcccgtcgacaaagacggcaacgccgctaatcagccataaaattcccatcgacatcaggctacgccaacggccacgcaagtattcaacgcccagtaacagcagtaccaaccgcgccatattttgcctgcttatcttgagggagctttaaattaagaaaaacaggtagcaagaatttaagcaaatttataacgttatatttttgatctagggtgaaaaatgttcctcaagcagggtcataaacgcccgggtacgcaagctgagatggcggcggctcgggtagagaaaccagaaattaatctcgccgtctatctgctcgcccaatgaaaccagcgtgccgtttttaatatcctcgccaatcacgatcagcggtaatagtgccgcgcctgccccggccagcaccgcgtcgtaaatcatcgtcggagacgacagccgcatcacctcccgcgtttccacctgatgctccacgccttgatgccttatctcgagacgcttttctcggtaaaggttgccgagcgcgataaaaggcagcggcgctccctgcacatccggacggcaaaccagcagcacggtatcgctcaaaatacgtttccccatcagctcctcgtccaccgagggctgcgcgcgaagtaccgcgtcataaccctcgcgaacggggtccacgcgccggtcttccgccaccacctcgagctgaacgtcgggataaagtcgggcatagcgtgcggcaatctcgccaaacgaggagtttgccattatggtcggtacgctgatgcgcagcttgcccgaaggcgacagtcgacgcgtgccgagcacctctgccaaatcgtccaattcagccagcagcggctgggacttctcgagcagaaaacggccctcgtcggtcaggcgaaaaccggtctgggtgcgttcaagcaggcgcacgtcaagttgctcctccagctggcgaacgtggcgggaaaggctggttttcgcgatgccggtcttacggctggcggcaccaaatcccccctctgcggcgacggcaacaaaactctttaagccatttagatccatatactgccccatatttggcacaagctgtgccgatcattgcatctgccaaaccatttttaaaacatttattgttgtcttattccgacagtatccaaacggtattcaaacaggagttttcaaaatgacaaccactaaccaggcagtacgtttccatcagtatggcggcaaagaggcggtaaaggttgaagatgtcactctgcccaaagcgcagggcccgcttgtggtggttcgcgttatcagtgcaggcgtgaatccggtggacaaaaaagtgcgcagcggcatgctgagtgcggtgttcccgcttcagtttccagtgacctcgggcagcgaaatttcgggcgttatcacctctgtttcagacgacgtgacggcgtttaaaagcggtgaccgcgttatggggctgaccggcaatcagggcggcttcgctcattacatcagcattgatgcgtcacaactggtcaagattccagacggcctctctgacgccgtagccagtgcgttgccggtcagcggtctgacggcgtggcaggcgttgtttgaacaagggcaactgcgtgaaggtcaacgggtcttgatacatggcgcggctggcggcgtcggctccctcgccgttcagcttgcgcatcgggcgggtgccaaggtgttcgccaccgcttcgccgaaaaaccatgattatctgcgtcgcctcggggctgacgaggtcatcgattatcatcaaccctcggcgtttgctgacgtcagagagattgatttactgctggattttgccggtgcaggttatgaaaatctgggtcagacgcttaaacccgcggcccgcgttgtgagtgccgtcaggccagatattgcggcgctggtgacgagccagacgccgccggttttcctgcaaatgcacggcgataatgccctgcttagcgagctggcacagcaggtcgcccacggcacactgcatctacgtttagggccggtgtatccttttgcagaggccgcggaggccatcgagcagcagagtgccggtcaaacaggtcgcgcgacgttggccgtcgcaggctgatttacggcgtaatcaccggctaacgctgttggcccgccgctgaataggcggcgataaactcccggcaatcgccacggcgatttctgccgggagttttcctttaacgtccggcaaccctaccggacaacgcattcttgccagactttctccgcttatccccttacccgttaaccgataatcaaaccttttacgtttggtatcggaaccaatcagcccaaagtaggcgaaatcattacgcttgaggattttctcgctcagcgccaagtcaagctgatgatcgtgggtaagcacgatgaaatacccgttggcgggcatctgctgcactgtttcttcgggtcttcgtcgacgatgcaggcaatctgcgggtcaacgtgcgcgggaaactcgctggcgcgtgaatcgacccaggtaatgcggcacggcagcgttgagagaatggcgaccagcgcccgcccaacgtgccctgcgccgtaaacaatagcctgcggctgtggctgacacagcggttcgaacagcaccgtggccacgccgccgcagcactgtcccagccgcgcccccagattgaagcgttcaatgcggctctcttgcgcaccgccctttatcatttcacgcgcgatagcggtggcctgaaactccagattaccgccaccgagggtaaaatattgacgctcggcggtaataatcatcttacagccgctgttgcgcggcgtagaaccctgatgctcaaccagcgtcatcatcacgcaaggctccctgcgctgttgcagctgagtgagttgggtaatccagtcatcggtgcgcataggtcctcctgcttattgggcggttaatgccgcattagtgacaacgtcactcatggactgtaaacgttcctgcaaccgcgttaccccgcacaacacccgctctggagtggcaggcgcatctagctcaggcagaagtcggtaatccgctacgctagcgatagcatccttgatggcacaccacacagaaatgccgagcataaacggcggttcgcctaccgccttggaatggaacacagtgtcttccgggtttttacggttttcgaccagcttgacgcgtagatcctgaggcacgtcggcgatggcgggtatcttgtagctggcaggaccgctggtctcaagacggcctttgctgctccataccagctcttcgcaggtcaaccagcccattccctgcacgaatccaccttccacctgacctatatcaatcgccggattcagtgagtctcccacgtcatgcaaaatatcggcccgcagcagcctgtactctccggtgagggtatcaatcagcacctctgaacaggccacaccgtaggagaaatagtagaaaggatggccggccgctttgctgcgatcgtagaaaatctttggcgttttatagaaaccggtgctcgacagcggcacctgattaagccacgcctcttgcaccacctgctggaaggtaaaatactgctctttgacccgcacctgcccgttgctaaaggcaatatcggcctcttcggcctgataatttttcttcagcatctctaccagccgggacttgataatctcggcggcattctgcgcggctttgccgttcaggtcagcgcctgacgatgccgccgttggtgaggtattcggcactttcccggtatcggtggcggtaatctgaatctgcgccagcggcacctgaaagacttcggccaccacctgcgccaccttggtattcagcccctgtcccatctcggtgccgccgtggttaagctgaatactgccgtcggtgtaaaccagtaccagcgcaccggcctgattgagaaaactggcggtaaacgagataccaaacttgaccggcgtcagcgccaggccttttttgaggtacggactacgctggttataggcttttatcgcctcgcgtcgtgccgcatagtctgcgctctgctcaagctcggcggtcatctcctccagcagattctgttcgaccttctggtagtaatgggtgacattgcgctgctccttgccgtagtagttcagtttgcgaacagccagcggatctcgtcctctttcacgcgcgatatggtcgatgatgtgctcaatggcgaccatgccctgcgggccgccgaatccgcgataggcggtgttcgaggcgatgtgggttttacagcgatagcctgtgatagtggcgtcgccgaggtagtaggcattgtcggcgtgaaacatcgcacggtcgataatcgagcctgataaatccagcgaatagccgcagttgcctgccagctttatctcgatgccttgaatcagcccacggtcgtcatagccgacgtcatagctcacgtaaaaagggtgacgcttgccggttatcatcatgtcgtcctgacgcgagaggcgcatttttactggtctgccggtgagatgcgccgccaacgcagccagacaggccgtgcccgctgcctgcgtctctttgccaccgaagcctccgcccatgcgccgcatatcaaccacgaccttgtgcatcggcaaatccagcaccgaggccaccagtttttgcacctcggtcggatgctgggtggaactgtagaccagcatcgcaccgtcttcgcccggcatcaccgtggcaatttgcgtttcgaggtagaaatgttcctgcccgcctatctccagttccccctgcaaccgatgcggcgccttcgccaatgcggccgcagagtcgccgcgctggtgcacgtgcggctcttcgacccagaactcttcggccagcgcctgtttcacgctgagcaccgcatcaagctcgcggtattcaatgatggccgccgctgccgccaggcgggcagcctcctgactggtcgccgccaccgccaaaatcacctgcccgaaatattcaattcggtctttggccatcagcggatcgccgtgggtcagcggcgcgatatccagagagcctggcacgtcgtcggcggtcaacactcgcaccactccaggcacagcgaagcaaggctcgatgtcaatacgcaggatttcggcgtgtgcgacgtcgctcaggcgcggcgcgagatgcagctgattgggaaattcctgccggtcgtcaatgtaaatcgcctcaccgctgacgtgtttgtcggcactctcgtgcttcatgcttttaccggtaccgctggataacccagcgcggaacagcgcggccatttcctgttgtggaggcgtcggttgagatttagacatactgagtcactcgcatcagggtttcgggagaggtggtttctatcaggcaacggcgcagcaggtttttcgcgacctgcatacggtattcctggctagcgcggaaatcaccgatcggctgaaagtcttgcatcagcgcctgacaggcgcgctcaacggtggcggcctgccacggctggccaagcagctgctgttcgcagttttccgcccgcttggcgatggccgccatgccgccataggctatcgtgacccgcgtcaccacgccgtcggtcacctcgagattgaacgcgccacacaccgccgaaatatcgtcgtcgaggcgcttggaaaccttatagaccttgagcgtgctgcccgctgcacggggaataacgacctgttcaataaactcactggattgcagcgcagtgtgtttgtagccaagataaaactgctccagcggcagcgttcgacgctgtgaaccgcgacgaagcactaatgatgcaccgagggccaacagcaccggtccaccgtcgccaatcggagaggcgttggcaatgttgccgccaaaggtgccttgattgcggatctgctgcgaggcaaaacgctcgagcaaggcaccaaaatcaggaaactcgcgggccaaaaacggcatgcagtcgctgagcgttgccgctgccccaataagcaggttcgtgtcggtcacagccagcattttcatctcgggaatgtggctgacagaaatcagctgcgtcagccgatggtgacgctgggtcacctcaagcgccaaatcggtgcctccggcgaccaaccgcgcatcaggattcgcagtataggcggcggccaattcatcgaccgtcgagggcaacaggctaaggtcgccttcgcgctgggtaatttgaccggctaccgggctaatcgcccgcaggcgctcaagggtcattttctctgcgcggtcaaactggtcggcgggaggctgctggcaggcggcaaaggccgcatcgacaatcgggcgataaccggtgcagcggcacaggttgcccgaaagcgcgtgcagcacctcttcacgctcaacgccgcgtttgactgcaaaatgttctttctgctggtgattcttttgcaatgcgaacagtgacatcacgaaaccgggcgtgcagaaaccacactgtgaagcgtgattgtccaccatcgcctgctgcacgctgtgcaaccgcccctgatgcttgaggtcttcaacggtgatcaactgtttaccctgtattgcagacataaacgtcaggcaggcgttgattggggtatagcgtaacgactcaccctgcggttcggccagtaccacggtgcaagccccgcagtctccggaagcacagccctctttcgtgccacagcgccccgcctctcgacgcagatactctaataccgtggtgtccggcgacaaggtggcttcctgctgtaaacggtcatttaataaaaattggatcatgggaatatcctgctcacattgcgcagccaacgggccgcaatcaaacaaaccaatcgatttgtacaactggtcaaactttaattaaaaaataagcaatattgatgccaacaatatgacagggttaatttttatcactgagttatagaacgctgcctcgcagaataagtgtagttacctcattaataatatgttcacggttttgatgactgtcggtgatgtcgcggtacatgcgattaacctgcaccgcgaagtcggcgtaatattgggtcaccgcccagatgttcataatgaacaggcgagcatcaagcgggcggagtttgccttgttcaatccattgattaatcaggttctccttgttaactatcttggcaatcgcctcgggccagtacttttcgagatagtgggcaccgctcaatacttcgctggtgaagatgcgcgacagttcgggctggttgaatgagaagttcagcttattgcgaatatagcggctcagtaccgcctctggctccaccaggctgtggtcaaatttaatgatttcaccccagacgctgagcaccttttgcaggagctcctcatagagctcttccttgcccgcaatgtaatagtgcagctgggtttttttcatccctgcccgctgcgcaatcgcttgcgtggttgcaccttgaaaacccttctcactaaattcggcgatcgccgcggcgtgaatgctctcgatcatccgttcacgggccattcttacccggctgctgctggtttcactgttcatattgggtgcattttttccctgtttttgcctctttattgcccatagggtgccgtttcacggcacccctgatatttatacagtgctttttacgccgggcgttggtaaaccactttgccatctaccagcgtgcggtagatgttgcggtcatcgccgagcgtcatcagcacgaacagcttctcggacagcgttttactgttgctggaacgcagctgttgaagcgcggttgcgccgggatccagcaccaccaaatcagcctctttaccgccgtcaaagttgccgattttgtcgtcgagatgcagtgagcgtgcgccccccaacgtggcgtgataaaaagcttcaaatgccgacagtcggtacttttgcaactgcccaaccttataagcctcgcccagcgtttgcagcatattgaaggtggtacccgcgcctacgtctgtgcccatgccgagacgcacctgcttgtgccatgatgcctgtagattaaacaaaccactgccgagaaacaggttggaggtcgggcaaaaggcaatgcttgaatccgtttcgctcagacagtcccactcatcttcgtgaaggtgcaaacagtgcgcaaatacgcagcgcgacccggtcaggttgtagtggtgataaacgtcgagatagcgttcatgctcgggatacagcgacttcacccatgaaatttcatcggtattttcactaagatgggtctgcaaatagatatcgggaaagtccgccttgatggcgcgcactttttcaagcagctcgggtgacgaggtgggcacaaagcgcggcgtcaacgcatagctgaggcgtttatggttatgccagcggctaatcagcgtgcgggtatcgcggtcactctgctccggcgtttccagtaccgcttcggggcatgtttgtccatcattacctttccggcgatgaggcgcatattgagcgaggctgcgacggtgaagagcgcgtcaaccgattgcggatgtacggtgccaaacaccagcgcggttgtcgtgccgttattaagcaactgatcgatgaaaaactgcgacattttgtgcgcatactcgaggtcatgatactgggcctcggtcgggaaggtatattcgttcaaccactccagcagctgttcgccgtaggcaccgatcatttcggtttgcgggtagtgaatgtgggtgtcaataaagccgggaacaatcagtttttcgcggtagtcatcgagggggatcgccgtaacgctctcggcgaggcgtctttcgccctcttcgcgagacccaagccagacgatttttccgccgtttagcaacataataccgtcttcgagatagcgagcgctggcctcaacatccgcagaagaagacactacttcactgaaatcaaagaaatttccacgaagagcgcgggtgatagtctgggtcataaattttacctgtcattgtgtatgacgaaagagatgtcacaccgattcaatagaatacgtgttgttatagtccttaaattcaaagcaagcgttgtgccagtagtttgaccgattggtcaagccaactggatgtcagtataaattactgaataaaaagtttttatttagagtcgttgcagcacgatttaatcaggtcgatgctaaaatctatcaatctgcgatttaattttttaaaagctgacttttaaaatttaataaaagataaaaagtggtgcaaccttgcaccagcaacaggcattgttgcttttaagagcgtcacggaagacttcagtttgaggaagttatggcgacacatgagaagcaatccctggctatcgtcacgctgacggccattggcgtcgtttatggcgatatcggcaccagcccgctctataccctgcgcgagtgtttggccggtgaatggggcgtgggcatcaatcaaacctcggtttatggttttctttcgctgattttctggctattgaccagcgtggtttccatcaagtatttactgttcgtactgcgtgccgacgacgcgggcgaaggcggtattttgacgctgatgtcgctggccgggcgcaacatcgatgcacgctatatgccactggttatcgtcatggggcttatcggcggcagtttcttctacggtgacggggtcatcaccccagctatctcggtgatgtcggccattgaagggatggaaatcattgcgccgaatctcacccgctacgttgtgccgctgtcggtgatcattctgacgctgttattcatgattcaaaaacacggcaccggcagcatcggcaagcttttcgcgcctgtcatgatgctgtggtttatcacgctggcggtcctgggatacgcggcatcatggagtatccgcaggtcctccatgcgctgaacccctactgggcgattaacttcttcgtccaatacaagctggtgtcattcttcgcgctcggtgcggcagtgctttccgtcacgggtgccgaggcgctttacgccgacatgggacacttcaaccgttcgtcgattcgcattgcctggttttcgattgtgttgccgtcgctggtcctaaactattttggtcagggcgcactgctgttgcagcatcccgaggctatcaagaacccgttcttcctgctggcgccggaatgggcgctgattccgctgttggtactggcggcattcgcgacggtgatcgcctcgcaggcggtaatttcgggcgtgttctctctgacgcgccacgcagttcgcctgggctatctgccgccgatgcgcattatctacacctcagacaaagagtcgggtcaaatttatattcccgccatcaactggatgctgtatctggccgtgctgatagtcatcgctagctttaaaagctcgagcaatctggcagcggcctacggtatcgtggtcacgggcaccatggcgctaacctcggtcctgttctgtctggtggcggtgcacaactggcaatggaatcgctgggcggttgctctgctgctggcgttactcttggtgattgacctccccctgttcggcgcaaacctgatcaaaattatggccggcggctggctgcctatctgcatcggtatcggcttcctggtggtgatgaccacctggcgcaccgagcgattcaacgtgctgcgaaagctgtcggagcacggcaattcgctgagcgcgatgataacctcgctggaaaagaacccgccggtgcgggtgcccggaaccgccgtttacctttcacgcgttgtgaacgttattccgaccgcgcttctgcacaatatgaagcataacaaagtgttgcatgagcgcgtggtgctgctgaccatccgtaccgaagaggtaccgtacgtgcctaacgtgcggcgcgttgagatagagcagctgtcgccgagcttctggcgcgtggtggcgagttacgggtggcgagaaaagccgaatatggagggaatttttcatcgttgcagcgtcgaaggacttaactgcccgatgatgcagacctcgttctttatgtcgcacgaggcgctgattttgggcaaacgcccgtggcatcataaaattcgcggcatgctgtttctggcgttggcgcggaatgcgctgcgatccccggacctgttcgagctgccgcccaaccgagttatcgagctgggcacgcaaatggacatctgactacttcaacaacacttcatactgcgggttaaactcgtcaaaaattggcaacgcggccgcgcctagagcggccgtatcgcccggtcatgccgataccggctccaaaccacatccttcataggccgcctgtagcgataaataacgtccggcagggtgatgcatttcatgtggcggagggcccggtgactgtcaaatctcccagctgccggtttctgcgttgtaactcaccggcatagagtccccagcgggattgttcaaccgccaggtattgctacttcggtcccggaacacctcgaacgcgctaccgtcctgctgaatataatactgttcaccctttttgtaagtgccatggaaaatccccgtcctctctattttacaccgctcaggtcaatccccgtcactttcaggctgtcatcaagcgtcggaagcgtaccttttgaattcacccactgattgttcttgagttcaggtcgttgaatcgccggacccttattaattgcaggctggccgatggtgctgtagtcgggattcatcttactgtacgttccctgaggagggcgtgagttgccccatgttcttgcgcctccctgtagccccacattagagtgtggccccagctgttggtgtctgcgtggtaactcactggcatatggtacgttgatgattgatcggggttcttcaaccgccaggtattgctacttcggtcccggaacacctcgaacgcgctgccgtcctgctgaatataatactgttcaccctttttgtaagtgccatggaaaacccccgtcctctctatttttacaccgctcaggtcaatccccgtcaccttcaggctgtcatcaatcgtcgggagcgtacctttcactcttgattcaaacatattttcaatcgatttgaaggatttgtttttcatgcacttaccggcataattactcccgatggcaatgccgtcaaatagcaagcctgccaggatattctgtaaaacgttagacaatattgcctgtttttcttcattagagtcggcaagcgtggccagggtcaaatcttttgctacgctaatactggaacttagcgcaatctttgccatgaaagtaatgatccccttaccaggtataaaacttgatgctccatttactaaatcgaatgcaatattaaccagctggtctcgaaggagttcgttgggagttttaaccatcgtgtccatatcttgtttcatacgactgataatggttttaacagtgtcagcaccaatattattggttttggataatgccaagcgggtctctttatgctcaatagggattttgttgccggtaatccaagttttagtaaatgtatcaaattttttcctgctatttttacactcgtcttgtgttttaatagacagatgttttaatatccagttctgctctttttgactaaggtttttatcattgtcgaactcaatgtaatcacctaatgcgtcccaggctaaaaccttgttcccttgggctagtgcaacaacttcctttaatttctcaccatttaaagacatcagcttaggtgtttcttccttattaatgtaacgcttgagctgatttttgaatctatcgtcaatgtcttctgacgttgaaagttctctcgccgtcgagtgaaatgaaaattcatagaaagcagatagattatttgttgtcccatcatccttttcaaggttagccatttcgcctttaaatgccgccgttatggcagaatctgtatctcccgtagtaaataatccactggaagagcctgggagaattttatctcgaaatgcaggtgggatgtgattatcacattccactttaaggttaatcccatgtaatttgccacaaacgagatctgtcagcgtaaagtgtgttgttttttttgccactgtgacgcttgattggcctctgccttccgttattatttgtgtggttttgatacggctgtctggagttaatggcgaaagcccattttcatcaatagccttttgaacataattccagatatacgaaggagcgtgaagtttagtgatagtagtctcagctccatttatcacgctttgcatataaggaacaataacctttgtcgtaacataatcctcatcccatgctccccggatattttcttccttctgcgtctcagttatgccctcgaccaagggagttgactgattaacattactggtaataggggtgagggtttattttcaggttttctgtaattcaacagaccacccctccaaatccaaagtgtagcccattagtatttttttcatcgttcgcattaaggttaatgtttaccttccatgcaatgctgtggtcacccgtccgcaaccccatcagcgtcgccataatgttgcgggtctccttctcacctttccccacagatgggtcacctcgtggcgcagcaagtccttaccagcagctccctcccggataaaaatacggctgtcaccgtccctgacgcatgcatcaaaatcacgctgcccgggcttgaccttcccgagaacaaccagctggtttgcgttttttccttccttctgataggagcggagtttctcagactgagcgtcacaggctacgaccagtgccgctggtgtcagccctcgttcttttatgaagtcacgctctgtttttgtcagaatgccgtttaacctggccttttcctgtgcaaggtctttcagtgcattgtccagggcacggtcaatagtcgcaacttcgtctttccccatgctctccggacccgctcgtccacgtctgacaatatcagccatctttccgacagcctgctccacgcggtctccttttccctggtaagggaacacctgattacgctctgatgcactctccatggcatcagttataaattcagccgccgcctctgcgccttcccttcctccggcggcagccaacgtggtaccggaactgatgaggttattccccacgaagtgattaccggcctgctccatcgtatgcgcgaagccgttctttttaatatcattcagcatcgccagcccgtttttggccgccctaaggacctgcggcaatgccgcatccgcggtcgatgcagcaacaaatttccaggtgtcatttctggctccggaaagcgttccagaaggcagggcatggcccggcataaccgactgcttcagaaaattaacgcgttctttccctgcctgatagattaaccctgctgacaccgctccacggatacgcccccatgcgctgcccacgatccccctggcatgaggatgttgacactctctgaaatcagtttacggagtgtcatactgacgagcgaactccccagcctggctgcacctttgtctgtcatcagatttgcccacttcagccccggctctgccagaaccgccctgtactcgcggggaagtttcagcgtgccatcacatttctgccggtaattttctttaatcagaacggcaaatgccttcctgtcaaatccgggtgagtcaatatctccggcaagcttctccgccagcaccgccacctgagcctgcttttccgccgggcttaactcttctttttcattcatccgctctgcgagcaccagtgcaagatacatcgccactttctgctgagggccgtaaacttcaggctcccggtgggtgaccacctgaagtgctgctgcagcggtccgcatcgcccctctgcctgcagcagtacctctgaggcaggcagtcccacttcggtctttgttaaccggtcctgcgaaaacgtcagggcctctgcacttccttccgccttacgggcttgattaacggcctctttgaatccgccctgacacttttgaatatctgtaaggaatcttctgagagtgtccactttttttcgctgctgactgatgtcttctggttgcgcagggagtttgcggggtcatctttttccatagcggtcagctgagccttcgccagggtgaattcattctgactggtcgtctgcagcgcgtgcaggtttttttgggtttcctgccagcggtgttcaacgaacgaaaaggcttctttcagctcagtccgggctaatgacactgctttagcactttttgcgcgcatgtcactcacattactcagggagtcagtgccctttttgtgcaccagcatatctgccactttattggcggctttggcacttcccgccagcgctttgcctttgagctcaaaccagtgcagtgacgtaagcagcggctcactttttacctcaagcaggtccgtcagtttttttctctcaggcccgggcgagcccatcttttcagtcacgcccgacaccacatgtgcaatttttgcgtatgcaccgcgaagcaccaccgccatctctttcagctgcgtcactgtatcagccccggagccaacagactgcaggttgcgggtatcctctcgtaccaggctgaacgccagtccggtttccctgagcggcggtttaagctctttcgacctgatacttttatgtgccagcgtgagtttctccactgcctcattaaacacgtcacgccgtgttttcggctcatcagcagtcatgtcagcacctataagcgttctgtacatggcaactgccgcagtagctgcagctttcagttccttagtactcgcgatggctggaggtttccctgataccagcatcttaaggtcgggcgtcagaaattcgcaaaatctctgcagctggctgacagcatcccggaccttccctttcggtaaagtgtcgacagcccgtgacagcgtttgtgtggcctcccggatataaatcagctcccggtatacgcctttttcaagattttgctcatgcgctttcaggttgtccaggacatcggtcaccgggtcttttttgctgcctggctcggatactttcacaagggcagcttttaccctgccggacttatccggataagtgctttcaatcgattcatttcttctcgccttcacaacctcaagcgcattttttattttatgccgcgcgttgctcagtttctctggtaatcccagaacatcactccctttggctgcaactttgacgcttttcaggatgttaaccgagtcttccagtgccgcagacaggtccttcaatgcctcacaggcgtccagacgaatctgtttttctcccgctgacagaccttttgcggtttcagggctgacctgaataacctccatactgtccttcaccaccttaaccgccgccgccagcacgctgcggtcttccgagcaggccagtttttttttcagcttttgcagcgagctcagttccttctgttcttcagatgtcagcccacccgccttgttctccagtgcagtgagccttttttcctgtgtttcatccagaccgtccagtttacccagcgtgttctccaggctctccaccgccgctttcagttccggtcccgaatcatcaagatactcccggtttctgccccctccatgataaactcattcgcagtggcaacgacgctttcacggatttcctcatccagcagcaagcggagggtctgagcatcaacaacctcttcttccgctttcgctatggctggctgcattcctgtgagttcatccgttccggccgcgctttctgccgcagatgccaccacatcctgcagtaacgattccgtggcgtggagaaggccttcagctgttttcgtaaccccggcaccttcaggaatatctttaaatttttcgctgggaaatatttcccacagcatctgccagttctcacgagcatagggttcgtccagttcaccgttcgcagctatgaatccccctccgagaggctctccctgagagcaggagaggctttctgataatcattcagtaaccggagagttttttcatgaggcttgggcatttctttcattgcactgcatccctgagagataatagcaagacagcccgggtcctcatgggtgcccgcactctctttgcgtacggcgtctgcctgagcggtggtgtttactgttgagagcgggacgctggcatgctgaaacttttttgtggtgggcatgggagtacttcctggtcaatgtctggctaaattgatcgggatattatcctgccgcaacagaaggcttttctggattaagctgatttcttatgtatttttacatgatgactagactggcgagtcatcatctgcggtcatcatgacagcccttgtctcagtgatgtagtcactacaacgggtatcataagcgcacagtgcgaggaactgtgttttccactgccggagaaatggcaccacagcgcccggcaggctagcggaaaccggggtcgggtaaggcatagcatcaacgcaccgttaaatctggccgtccgcagtgaagggatccccctgttcgacgcagaaagtggctatcgactggaagagcattaatcttagtaaatccgccgttcgagatgagcgaatggcggattaatcctcctaatctctcgccgccgcggctcgcgatgactgaagcgagcgaattcctcgcgcaatccgtgtttctatctgggagtaaaaaatgcagccaaagatcaccgcgataatggaaaatacaatgccgaagagatcgtgattgatattgaagtgagtaaagaagaagtgtttggagtactcgaagaaatagtgcgtgatatagatgctgtaagacgcattgcctacataaactaataatcgatatatttttccttgcgactccctcatcaaactaaacagaaaaacaatcgccagcgacgttaacccgaagcaaacgaatctcggagccccttttgccgacagccacattcccagtaagaaaaaaatcacaatcagcggacaggcataaagactggggaggcgggcctgacccaaccgcataaatatctgcgcatacacgcagccgatagcaaagttaatcatcagcgtatcgccaatcatatagctgaaattatccaggtccagacgcggtccccgcagcgagaagaagttaaccaccaggaccatcagcacaatcagcgacgcagtggtaaacaccaggctgcgtttatttgggaccagcatcatgatgaccgcataaatcaggtaaaagaacatctcatacaccagcgaccatgagggaccgaccagcattaaatagttggggtcgctggtaaaggtgggcagcagcaggatattaccaaaaatctgatacaggctggcgggatgattttttagcagataaatcagtaaaaaaggggtcaacacgagcaggaataaaggatagattctctccaccctcttcttaataaagtcgagggcggtcgacagccccagcctggaatcttcacgggttttataactcatgataaatccgctaagaatgaaaaaggcatctacgccgaaatcgccaatatattgcaggccaagacgcagtgaaattgcggtctgagagtctccccataggtggttaatcacaacgaaggtcgcagcaaaagccctaaggatctgtaatgaatcaatttttgatttcatcgattgagtcttgttttgagttcaactccttttgatctgatttgtctcaagcggcgcatacttaaacatggaccaccgacctcttcattcaatttagccaataaatctattttaaccattctcgctgatgcgctatgctcaaaaatcacctttccttgcccgatcttttgctaagaatcgcaaaagaaaagacatattaaagctattaatcagggacttgttaatgttcagctcaggggatttcctttatattcaggcgttatgtcgatgaaaaaattttcactgccaggcggttccgccctgccactgctggttgccggcgccatgttcatggagaacctcgatgcgacggttatcgttacggcgcttcccaaaatggcactggcgtttggcgtaccggctatcgatcttaatatcggcgtttctgcttacattctaacccttaccgtctttatccctgccagcggctggatagcgaatcgcttcgggacgcgcaccattttctcattggctatcatactgtttactttggcctcggtgctgtgcgcgacgagcgtaagtttgcccacctttaccgcggcgcggatgctccagggatttgcgggagccctgatggtgccggtcggcagactggtggttctgcgcaataccgccaaagcagatttgattaaggcgatcgcgaccatcacctggcccgcgctggtggcaccgatattggggccaccactgggcggattcatcactacctatgcgtcctggcactggatttttatcctcaacgtacctctgggatcatcgcactgctgctaagcctgagattaatccccaatgaaaaaggggcaaaaggcataccgtttgacgtactgggcttcctgctgaccggcattgcctgcctgggcttaatgtttggactggacctgtttaataaaggcgatgcaacctattggctgccgtcactttgtgtgatcggcagcctgctggtgggcgcgttggcggtgaaacactcgctttcaagccctcacccgctattgccgatggtggccatgaagattaaaagttacggcgtaacggttatcggcggttcactgtttcgtatcgccattggttcgctgccgttcctgctgccgctgctgttccagctcggctatggtatgaacgctttcaacgcgggtttgctggtgttatcggtatttgcgggtaatctggcgatgaagcctttcacttcggcaattctgttccgtttcccgtttcgcactatattggtggtcaacggcttgctgaatacgttgaccattttcgcctgcgcgtttctcaccccggcggtgccgacgacgctgacctttatcttgctgtttatcagcggtatgacgcgttcaatgcagttcacggctatcaacacgctcgccttttcacaggtgcctggcccacaaatggggggcgcgaacacgctgtttaatacggcacagcagctctcgtcagggctaggtattgccatcggtgcactggcattacgtatcgccgaacactttgagccggtctccagcaacggcacctcgttgggcagtttccacactgcgtttatcatcgtcggctgtatcgccatcttcggcatgattgacagcatgacccttaacgttaccgacggcgatgagattcggcaaaagaaaaagaaagcgacggccccgccgtctgaaaccgcgaaggagccagaaaactcggctcaacactgactcatgcaaaacaatcaataaggtaaggagacagagatggaatatcgtcaacttggccgttcaggactcaaggtgtccgcactgagcctgggaaccatgacctttggaggtcagggaaagtttgctaaaacgggacaaaccgatgtcgcgaccgcacggcggcaaatcgccctgtgtcgtgaagctgggatcaaccttttcgataccgccgacgtttactcgggcggcctgtcggaagaaattttaggcgaggctcttggcaaggcgcgaaatgacgtgctgattgccaccaaggcccgtttcccgatgagtgaaggccccaacggcggaggttcttcgcgtcatcacatcctgcgtgcctgtgaggccagcctcaaacgtcttaacaccgaccacatcgacctctaccagttgcaccagtgggacggcctgacgccgctcgaagaaacgctgcgtgcgctggatgatctggtcagcagcggcaaggttcgctacgtcggtttatcaaatttctctgcctggcatctgatgaaaacgctgggtgtcagcgatacgcatcattgggtacgcccggtgagccagcagattcactacactctgcaagcacgcgaagcagaatacgagctgttgccggtgagccacgatcagggcctgggggtgctggtgtggagcccgttagcgggtggcctgctttcagggaaatatcgccgcaatcagcctcagccggaaggcactcgccatctagccgaatggggtgaacccccggtgcgcgacgagagcaagctgtacgatattgtcgacgtactggtcgacattgccgccgcgcgcggcgtctcggcggcacagatttcgctggcatggctgctgtccaaaccggtcgtgacctcggtgattgtcggcgcgcgaagtgaagagcagctggtcgataacctcaaggctgccgagataacgctcagcgcagacgagctcgagaggctgaatcaggtgagccagccgccgctgatttatccttactggcatcaggcgcagaccgcagccgacaggctgtctgcggccgacttatcgctgattgccccttatttaaagcaaaacaaataaccgcagcaagattattaaatcgataactagacacattatgggcctagccgctttcaaccactctgtgttattactaattgcaagcacatgtcgtactctttgccccgtccgcgggccatttattctaaggaaatcagagatgatcgtttttgtaaccggcgcaacagccggctttggcgccgctattgcacgtaaatttgttaatgctggacaccaggtgattgcaacaggacgtcgtaaagaacgtcttgctgatttgaaggccgaactgggcgatgcgctgtatgtcgcgcagctggatgtgacctctcgtgaatccatcgagcaggccatcgctgcgctgccggccgaatggcaaaacatcgatttactggtcaacaacgcgggtctggcactgggtatggaaacggcggacaaggcgtctctggatgactgggaaaccatgatcgacaccaacactaaaggtctggtgtatgttactcgtgccgtactgccgggcatggttgaacgcaacgtaggtcacgtgattaacatcggctctaccgccggtaactggccttacgctggcggcaacgtttacggcgcaactaaagccttcgtgcgccagttcagcctcaacctgcgcaccgacctgttcgggaccaaggttcgcgtgaccaacgtagagcctggcctgtgcggcgggactgaattctccagcgtacgtttcaaaggtgacgatgcgaaggtcggccaaacctacgacaagaccaacccactgacggcggaagacgtggcggagtcggtattctgggccgcaacgctgccagcgcacgttaatatcaactcgattgagatgatgccggtaagccagtcgctggctggcctgcgcgtaagccgcgacgaataatccctggcttgacagcagtaaaaaagggcaacggatccgcttcgttgcccttttttcttgccggtcaccggataattagtaagacttccacccggaaataataattagcatacccgccaatgcgacgacggcacccagccagtcggtggtcgccagttttaccccatcaacgtagcgcagccaaaggagcgcggtcaccacgtagacgccgccgtaggccgcataaacgcgcccactcgccgcgggatgcagcgtaagcagccagacaaacagcgcaagactggcggccgcaggcactaaaagcacggcgttgccgccctttcttagccacagataaggcaagaaacagccgataatttcggccagtgcggtagcgaaaaatagcaaggtggttttgagcatgagaaggagactactccgttagttcaatcatttataaaccaatttcccgtctttaggtgacgtatcccgtcagggtggtataattttaatcgtcgcgtcagcgatgtgtaaacctataaggatgagctaatgaacacaataattatgtctcgactgctgcgccggatgctgcctgtcgccctgctggtgctttcagggacctggcaagtgacggcccatgctgaaaccaattgtgcaggtgggacctgtgtatttggcggcagcggtaatggggcgatgagcaacgagcaagcgcgccagagcaaagaagaatggaacgcgacccgcacgttacgcgatcagagaattcaacgtcaggaaagagacaacgcccagtacgagcaggctgctgcgctgcgtgaccgctgcaacgcaagccgtaatatcaacgcttattgggaacccaatacccagcgttgtcttgaccgcgtgaccggcaaccaattactggcaccttaatcgctcgatagattgcagttaactgctaaactttgcatgcaagcttttcaaaaaaggacgaaatcatgaaaaagactctgatggttggcttggctcttttaacgctctcacctctggtagctatggcctcttgtgacagcgttaaagcggatatcaccaagaaaattgtggcgaatggcttacccgagtcaggttttaaactcgatatcgtcgccaatgaccaggccgatcaggctggcggtcaggttgttgggcattgtgataacgacaagcagaaaattgtgtacagcaaaacggcaaatggcgcagacgactcgacggcaagccctaaaaccggcaccagtcaggactcgtcagcccagtaatacactgcaattctgacctcaaggcttaaacagtcgcctgtttaagccttttttattgcgccgtttcaggactctctcttcgccggacgatgaccgaccggcagcaacagcgcggcggctattgcaaagaatgacatgacggcggcaagaacgaaaacccagtgcagcgaggcagaaacctgctcgatgatatgattcagcctttcagccgagagttgctgccgttgtagtttgtccatcagcatctgcaccgggtcatgcaaggcgggcaggcgattttgcaggttaacatttaacgttgcgccgagaatggccgtccctagcgccgacccgagcatacgggtgaacagcgtcgaggccgtggcgatacccgcaccgaggcatcgaccgagttttgtaccgagacaataaacgtggtgttgcacaaccccatgcccgcgccaatcataaaggcagaaactctcgcccaccacagacctgagcccggagtgagcagcaggagtgccagactgccaaacaccaacagcaatgcgccaagcagcaccgtgaagcgatatgaggtcgcctgcatcagctttccgctcagcgtgcttgccagcggccagcctagcgacatcagcgccagcgtggtcccggcctgtagcggcgtgccgccgagaacccctgaacataagtcggtaaaaaggcgctgatgcccatcatgctggcaccaatcacaataccgccgatattgccggcaaccaccaccttgttctgccacagtgacaggggaaacagcggttctggtgcccttttctcctgacgcacgagcagcgccgaggccatcacggcaagtccgacgagcagcagggaataatagccgagggactcagcctggagtaacgccagcagcatagcggccaccgccagtgaaagcaggccggtaccggcgaggtctagcgcgtgggtctttctgctctcctcagcgggtaaatatttggcaagaatcagcatcgcgacaatgccaatcggcaggtttatccagaacaccaccgaccaatgaaaatgctggacgataaacgcaccgagcagcggcccgacgatggccgatacgcccacacgctggcaagataaccctgcgccttagcgcgttcatgcgggccgtaaatattggcgataagcgtggtagcaaccggcgtgatggcgcctgcgcctaatccttgcagggcacggaaggcaatcatccacaccaacgatggcgcgaatccgcacagcaccgaaccgccgagaaacagcgctgtaccaatgaaaaacatcttacggcagccgtagagatcggctaaacgcccatagataggcacggtgatcgcctgcgtcagcagatagatggcaaaaacccagcctaaaagcgagaagccacccaggtcagcaataatgctcggcatcgccgtggcgacaatggtgacttcaacggcggccataaacatcgaaagcatacaggcggtcagcaccagcgggcgatgacggctatcgacgtgaatgtcgggtaaggtattggaagcgatgggcgttctcctatatttttttcttgttcagtatatcagcggtctttctgtacaagcttgctaatcgtgccaatttgcgaactgtatccaggccttttttgattgctgtgggtaaaactcaataaaacaataggctctgtggtgaggcccgcctgcttctggctctacgagctgattaagctcaagacgggtttaggagtacaaacttactgaatacgattaaacaggtttatcaaaatctatttcttttattaacgctttatatcagtgagacttggacttcaactgattaacccgaggtctgagtatgaaagtctcaacatcaggaaaagtttttaatgaaccatcttccttataccggtcatcaacagattgtgcagcatcattaaaagcaaatcagtcatacggcaagttatttactgatgccttcaccccttccagaggtgaccttatatttggtttgtcatcgattattcgaggggaagaacgttactcttcatgcacgccattacgcctgattgaaagtttgtttattgcacttaactttatatctgaaaaacccgatttttacacctatactggcatggtgaataatgaaaaattaaacgtttttaagacactcaatgaatatattgaaagaactgaaaatacaaatgtggatggggtcgctaccccctcagtgaggtcatgagtaggctcatcaacacattaaataaagagcatttaaaacaaaggattggcgtagaaagcaaacatgcaaaattcgctataaatgccatattgagagaagacgagactgctttattgagtattccaggaataaaagacgataatattgctttggactatcttgccagatttgcggctcatatggaaagtattgagcgtgagctgcatgattttaatgccgatattgcacggctttttagtacatcgtcgaatacatttacgcgcaatacacttgacaatttgtttgaaaatctaggcgatcatccttgttatgcaccctcatactctcttttagaggcagtcaatgacaaagcagaattccctgataaaaacgaccaaatgcgtgctgtcgaatttaccattcgtatactttctcgtatgattaagggtgtgattgatggatttattaaacaggtcagtgaaaatattccgctacaaaaacaacaaaatgataacgctcagctccacttctttttggatgatattaagatggaggatgttgtatgtaagtcagactcaaaaatgaatggaatgacagcaatagaattacgccatttgtatcgatgcagagcacaattagctgacgtagtcacattttataaggacaaaaaatcggttcccgcaccgtgggaaaaaacccagaactatggagccgttatctcccctctactgaacctgttttagactatattgcattggacagcggaagcctcagaaatagctttttgtcgctcgtctgacgttgaaatgactgactgccacggagaacgctctcggtggcagtattcttaggccatggcggccagtcgggaaagatctaaaaaatgagccatctcgcgcgattcggcacggggtaaatacggaatctcacccagcagcggcgcgtcaatattttgctcgataaccgcaatggtctctggataatgtgccagacaagggttgattctattcgctacccagccgagtagcgtcacgccgtcggcaataatcgattgagcagccaacaaggcctgactgacgcagccttcctgaataccgaccaccaacaccaccggcatttttgtttgcacaatccactctgagtaagtctgttgcggggtaatcagcgtgcgccaaccgtcacagccttcgataacaacggtgtccgcttcctggcacataaactccaacccttcggtcatacgttcaaaaatatcgaagggtaagtcgctggtaaatatatcttcatcggataaggcaaaaggggttatttttgccaacggatatgaaatagaagaggattgctgcagggtcaccgcatctttattgcgcacgccgtcggccaatgcctggctgccggtggcaataggtttataacccagcacaattttcccctgcgcggccatggcctgtaataatgcgcgggaaacaatcgtttttcctacccgggaatccgtacccgtcacaaaaaagtgcgttagcatgtccaattactccgaataactccatgtactgtccaaacgccttggggaaacggcagatgcgtcattcattaccatgacgtaatacgcacaaagtttaggggattaaccggattagcaacttgcgttagcgcaatgttttgtgggtgcgaccggtgttgtgatataaccttataagttatctttcggcttctcaaatacttccaacctgaataaaaactatgattgatgctcatgcggtgctgactgtttttatggtttatgtggctggtgtggttattcctggcccaaactttgttgctgttgtacataaagccgtcgcctcatcgcgttcggcagcgttggcattggttgcaggtattgtggtggtgaatttattctgggcaagctgcgcaatagcaggcgttgggattgtgtttacgtcttttccgtgggtagcgttgctgattaagataatgggtgccgcttatcttatctggtttggttcacgtttattgttcaaagccgggacaagcgtaatttctttacccacagaacagaaggacatccgttttcggcaggcctttgttcagggagtgataacgaatatcggcaatccaaaatcgatggctttttatgccgctattttctctaccgccgccccagcccacgtatcatcaggtacttttttcgccatgttggccgttgtcggtattattgccgcactgtggtacggcgcggtcgcactggcgttgtcccaacctcgtatttcttccgcctaccaaaggggcaaaaagagtatcgacaggctgtgtggcagcgtgattgttttattggggattagacaaatattgaaataagccgacgctaaccctgcaataatttcaccagtagtgagccattataaagcgcgtctttaaccagtgctgcgcccggcatggtgccatgatttgaaaactgcgtggattcaagctgaatattttcgctgtaggccggtaaggactgttgctggatgcaagacataatggtcgggtgcagaaccgactgcgcctgattaagcggcgaaccgatcagaattttttcagggttaaacaggttcaccataattgccagaattcgccccacattctgcccacgcccacaataatatccttcgccagcgcgtcgcctcggttcgcagcatcacagaggttttcgacagtgatcggcagtccattgagcaaagaattaggcgtaacctctagacgttgcctgaccaactcgagaatattatcgatgctggccagagtttccaggcagccatgattaccgcaataacagcgcttgccgtaagggtcgacctgagtatggcctatctcgactacgctactgctgttgccgtgcagcacctgcccgccggtaatgactcccgccccgacgttatcatcgataactacctgaattacgttacggaaaccgcgtgatgcgccgtacagggactcagccttggtccaggccgcaatatcatgctggataaaaaccggtaaaccgctgcgtgcggccaaggccggaccgaggggacggattccaccggatagaacggcattttctgaatgacaccttttgcggtgtcaatcatgccgggcaaggtaattgccattgcggtcagacgttcaagtttgctctgatgatgaataaaaaattggtcaatgtgcgcaataatgcgatcgagaaacggcacggcgtcttcggcgacaaggggaagaatatcttcggcaaccagtttactgctcaggtcgcgcaaactcagcgttagcgtgccaagactgactcgcgcagagagatagtgccaagcctgggtatcaaggataagcctattgcaggacggccacggctgcccggctcctgatattcggtttcttgaaccagatgcgcctgaaccagttcgcgtacaatctttgtgatgctggccggagcaagctgcgcttttttggaaagctcgatgcgggaaattggaccaaactgatctatcagtcggtaaacggtaccggcattaatttgtttgatctgatcgatgtgtcccggctggccttccactatcactcaacgtgcctcgttatttttcgcgcttcgaaataaatattaaaggctatgttgtagcttttgtcatttatcgtcaactatttgattcgatatgtgatttagtgcacatattacaattaatacctgaaggaattgcaggtttaacaggctattcgccgtcttcaatcatcattttagccagcgccaaagccggcgcagaaagcggacgatgacgatgactgaccagccagacctgggtattcacctgctcatctttaaaggaaagatatttaacgccgtcaacctgaatacgtttatacgaggcgggcaatatcgatacgccaagacccgcggaaatgagcccaatgatggtcaacgcctctccgacctcctgagtaataaaaggcgtaatgctggcgagcgccaggcgctgaagaatatcgtcatacagcgaggtgcctacgtccttggagaaaaacacgaacggctgatcggcaaggtggctcaacgtcagctcgccgggcggcagttgagtcagtggatgctgctcggggaccacggcaaccagcggctcggaacgcaacagatgatgctgtagaacatcgggcagcacgccgttgcgcatgacgcccagatccagagtcccttcaaccagcggttgcagctgctgttggctattgagttcttcgatacgaatattgacgtggggatgcgccattctgaagcgctgaaaagtgcgcgatatctttttcagaaacggtgccgatgaggtcagtccaatcgtcagattgccctcctcgccgcgatgaatgcgcgccgcctgctcagagacgtcgtgcaccttgcttacgatgctcttggcctccttcaggaacatctcccccgcctgggtaagacgcacgctgcggttggtacgataaagcaacaccgcaccaatttgcgtttcaagcgcttgaatctgctggcttaacggcggctgcgagatgtttagcttttccgccgcacggccaaagtgcagctcttctgctaccgcgatgaaatagcgcagatgccttagctcgatattgttcacacaaccctcattgatatctttaaagtatcaaaaccctgtaattaatatattagattaagaaaataatactgagtaaaattttctgacacacactattgtttcaaaataattttattaaggatttcacgtgaacatcacgcgtcggcagcccgcagactctgcggcaggccaatcggttaatgatgatgaactgcacgctatcaccccgcaggtttcaacgcccgtaaaagacgactttatcaagagaggaacgccgcagtttattcgcgtgacgttggcatttttctcggccggtttagccactttcgccctgctttactgcatgcagccgattatgccggtgctgtcccaggagtttggcgtttcgcctgcggcaagcagtctttctttgtcggccgcgaccggcatgatggccatcgggttgctgttcaccggccctatttccgacgccgttggccgtaaaaatgtcatggtggttggcatgatgctggccgctatctgcaccattgtctgttcagtcatgaccagctggcacgccattctgctgatgcgcgcgttaattggcctgtcgctgagtggcgttgccgccgtggcgatgacctatttgagtgaagagattcaccccagcgtggttgcgttctcgatcgggctttacatcagcggtaactcaataggtggcatgagcggacgtctggtcaccggcgtattaaccgattttgcatcatggcgcgttgccgttgccttcctcggcgttttctctctgctttcggccagtatgttctggaaaatcctgcccgcgtcgcgtcatttccgcgccagttcgctgcgcccgcgtaaattgatgattaacttcaagcttcactggcgtgatagcgggttgccgctgctgtttgccgaaggttttctgattatgggcagcttcgtgaccatgtttaactacatcggttaccgcctgctcggtgcgccttaccacctgagccaggcgattgtcgggattctgtcgattgcctatctgatgggtacctacagctcaccgaaggccggtgcgctgaccgccgtttacgggcgtggacaggtgctgattggttccttgcttctgatgctggttggtatcctgataaccgccttcaacccggtatggctggtctttatcggaatggcaatggtgacaggcggcttctttgccgcccactctgtcgcgagcggctggattggcaggcgtgcgaaacgcgctaagggacaggcgtcgtcgctttatcttttctcctattacgccggttcaagcgtagcgggcacgctcggcggcgtgttctggcaccgcttttcctgggttggcatcaccgcctatatctgcgtgatgctgctgatcgccgttggtatcggttatcgcctgatgaagttgtcagaatctcgcattgcacacagctgagcctctctttccccttaccagagtgttagactttaaagcgagccaataaccgtcctcgctttaaagtctacaaggcaaaaaatcacctaaatatacaataattctcgatatccaaactgaccccaatctccccgacccgcctcttcatcttgccagaaaaaaccctttctgatggtcaggtgtgcaccgttgatctttataggctatattgtatgttgtaactaattggaggggtgatggtcagctacgatttgaaattacgcatgaatgaatgttttcgggagttggaactggcgacaacggatttaactcgcttcctggatcggctggaattgcttgaggcgcgagtattttcccttccggaaatagaaaaaggcgctgaacataatcccgcttctattatcgaggttacgccgcatcagggtgaagccgcccaccagctggcgatgcagcatttccaaaaactgtttatccatcacaacggcctcaatgttagcagcaaagccgccgtcaggctgccgggtgcgctgtgttatgcggtcgatcaggctgagcatcaggccgcacagctgctggttcaggaggtgaacaagctcaagagcgagctcgaaaatatcgtgactgttgaatctggcctcccttctgagcagcgttttgattttgtacacagtcagctgcgtggacttatcacgctcaacgcctaccgctccatcaatacccttttacaacctgactcagtgcgctttggctgggccaacaagcacattatcaagaacctgagccgcgacgaactgctgcaaaagctggagaaaagcctgacggccggtcgcgcggtgcccccgttcacccgagaacagtggatggaaaatattacacgcgaaatcatcgatgtaaaaaaactgcccgagcatgccatcctcaaaataaaacgcccggtcaaggttcaaccaatcgcccgcgtgtggtatcgcaacagtcaaaagcaggtgcaacacccctgccgtcgccgtttatcaccctatgcctgcgtgacccgcttctacagattcccaagttaggcgagctgcccaactatgacgccagcgcggtaaaacaccgctataagcccgaatcgcaaccgcttaatctgttgattaaacgcctgcatctttacaccgatcagccggtataacctctcaaaaagcataaaaaaggctctggccgcgaacggacagagcctttaatcggtcgttaaactaacgacttattttttcatgctgccaaccatgtcttctggacgcacccactcatcaaactgagcttcggtcaggtagccaagcttgagggcagaggccttcaaggtcagaccttctttatgcgctttcttggcgatttcggcggctttatcgtaaccgatatgggtattcagcgcggtaaccagcatcagggattcgttcagcagctgagtgatacggtcacggtttggttcgatacccacggcgcagtgctcgttgaagccctgcataccatctgccagcaggcgaacagactgtagatagttgtgaataaccatgggacggaacacgttcagctcgaagttaccggatgcgccaccgatgttaaccgcaacgtcattacccagaacctgtgcgcacagcatggtcatcgcctcacactgagtcgggttgaccttgcctggcatgatagagctgcctggctcgttttctggaatcgaaatctcgccgatgccgctgcgtgggctgaagacaaccagcgaacgtcgttggcaattttcattagggaagcagccagacctttcagtgcaccgtgaccatgaaccagcgcatcacaggttgccagcgcttcgaacttgttgggagaggtcacaaaaggctgaccggtcagatcggcaatcgctttggcaacgcgaaccgcatactcaggatgagtgttcagaccggtacctactgcggtgccgcccagcgccagttcagcaatatgtggaatgctagcttcgatgtgcaccagattgtgtgccagcatcgcggcccagccagagatttcctgtcccagcgtcagcggtgtagcgtcctgtaggtgagtacggccaatcttgacgatatctttaaaggcttcggccttgtcggtcaacgtcttgtgcaatactttcagttcagggatcagatgttcgcgaacagaaaccaccgctgcaacgtgcattgcggttggaaatacgtcgttggagctctggctcttgttaacgtcatcgttagggtgaatcaaacgaccttcgccacgctcgccgccaagaatctcgcttccgcggtttgccagcacttcgttcatgttcatgttggtctgggtaccggaaccggtctgccagattgaaagcgggaattcactctcatgcttgccggccagaacttcgtcggcggcggcaataatcgcattaccacggtcggccgggagcaggccaagatccatgtttacggtggcggcggcacgtttggtctgagcgagagcgttgatgagcgcggtgggcattttttcactggaaatacgaaaatgctctagtgaacgctgagtctgtgctccccaaagtttatcggccggaacttcgatcggtcccattgagtctttttcaatgcgatgagctgccattactgtctccttacgcggtttcttcaaaaattttaaattgcagggtaccgacgacgctcccaaggctgtgccgacggataggcaattataaccataaggttaacgagttgttgtaggaatttcgggatttggcgctcaccgcactttttattcacgatcgggggttaaatcaggccttgctgcaaaatacaaattaaaaccttattaatcataaggctactttgattcagtcgctttattgttcgcttcgtcatgacgatggacgtttccccaatcacacatcatatccagaacggggatcagcgaacgccctctttccgagaggctatattcgaccttaggcggaatttgcggatactcatttctgataattaaagcgtcactttccaactcttttagcgtcagacttaaagttcggtaagaaatggtcccgattcggcgtttgagctcattgaacctcaataccggactgaggcccgctaaagaatagagaatcatcattttatattttccgcttaccagtgaaagcgtatagccaaaccccgtttctcccgtaatctcgcaggaagcatcgaccgtttcttcgctcattacactatccatttgtatagtacatatcaaaaatgacagtattgtactttaaattaaacctccctatgatgcaaacacctaataaagcccctattcaatctaataaccagggaataaattttgaaaactctaatcattgttattcacccaaacataaatgattctatcgtgaataaaagatgggtgagtgagctggataaatatccggacttatttaccgtccactctctttaccaacattatcctgatggcatcattgatgtagagaaagaacaacgattaattgaacaacatggaagtattattctacagtttccgctttattggtttaactgccctcctctgctgaaaaagtggctcgacgaagtccttacctacggctgggcatacggttcgaccagtggctataagcttaaaggccgtaaatttgccttggcggtaagcgctggtattaagcaagaggacttcacgcgcgatgggcgttatcgttattcactggaggaaatactcattccgttcgagatgactgcaaaatatgtaggcgcgcattatctcccgttttattctgtctacggcactgaaattggaatttcacaacaggaattagaaagcaacgctaaaggctatattgattatctcaattcatttagctaatcgcgttataaaaagccaactgttatttaatcttatcgttgagcagcattaataattaacgggctcgcgtatggcctttgtgcccgatagctcacgccatgaacagattgctttaatacgttttaatccggccgcgtcgaagcgactgtcagttcagcaaggttgtgggaagttgtcgaacagtgcttacagaatcacagcacatctcttatgataagcgcaggaactcaatttctcttccagattaggatgaacccatgaaaaagatgcataacaatgtacaaaattacgcctggggaagcgttgacgcgctcaccaacctctatggcattagtaatcctcagggaaaaccgatggccgaactgtggatgggcgcgcacccgaaaagcagctcttcaatcaccgataacaacggcaataacgtttcacttcgcgacctgataagtcaggatctcgagggtaatctggggagtaaagtggcgcagcgcttcggcgaactgcctttcctgttcaaagtactgtgcgccagtcaaccgttgtctattcaggttcacccgagtaaaagcaatgcggtagtgggctttgataaagagaacaaggcggggattcctctcgacgctgccgagcgtaactataaagatgccaatcacaagccggagctggttttcgccttgacgccgtttgccgccatgaacggctttcgtgagctgagtgacattcagtccctgctacagccgatttcgggggctcatcctgatatcgccagtttcctcgctcacccggataaggaacatttaaaaacgctgttcgccgcgctcctcggcatgaagggtgaaactaaatcgctggcgttagacattcttaaaaacacactcaaggctcagcacggtcaaccgtgggacaccattcgcagcattgcgcaacattatcccgatgacagcggtctgttctccccgttgctgctcaacgtcatcgaacttcaaccgggtgaagcgatgttcctctacgccgaaacgccgcatgcctacctcgaaggggtggcacttgaggtaatggccaactcggacaacgtattgcgcgccggtctgacccctaaatacattgatatcccggagctctacgccaatctgaagtttgaatccaagcctgcggatgcgttgctgaccacgccggttcaaaaaggccacgagcttagcttcccgatcccggttgaggattttgccttctcactgcatagcctgagcgcagaaccgcagtcgttggcgcaagacagcgccgctattatcttctgcgtcgaaggccagaccgtactggaaaaagacgggcatcaggttgtccttcagccgggtgaatcttgctatctgtcggcctccgactcgccggtaaacgtcagcggaaatggacgaatcgcccgcgtgtttaaccagctttcctaaatatcttctgtaaaaacaaccggcaaaaagggacaattttcctaaatgtttgcctaaaggccggtttttccaccacaataaaagcagtaaggcattaagtttgataaccttaacgacctgattgagaggctgtcgttactgatagcagttaaaaggatgaacagaactatgaaaaaatcgttagtcgctgtaagcgtcatcgtagtacttggcgcagcatggacaggcacttcctggtacacaggaaaaatgctcgagcaaaatatgggcgatacggttgccgaagccaattctcagattcaagcccactatcctcacgccggtatcaaactggtttatcaagattatcaacgcggtattttcagcagcaccgtgcgttttgtggcgcagccagacggcaactcgcctgacaacgtgctgcaaccggggatgagattgctttcctcgagaccctcgatcatggtccattcccggccgctcagcttaaaaaattcaatctgatcccgagcgcggcatcggttcacaccgaactgcaaaatacccctgcggtaaaagacctgtttgacatgacccaaggcaaatcgccggttaccgcggaaactcgcgtcggctacagcggtgacaccgcctcggttattaatattcaacccatcgatttccagaaaaataacagccgacttcagttctctggtgcgacggttaaccttgacgccgataaagacctgaagaaggtgaaaattgacaccaaggccgatagcctggcgtttacctcgccaaaccagtgggccaacttgagaaaattacgctggccggtttgaacctgaccagcgacacccatcagagccagtcccagctttacattggcggtggcaatctcaatgccgacaacattggcattaatatcgacaacaaagatgtcgctcaggttgctggcttcaagctgaacagtcaatttgatgaagagggtcaaaacctcaaaggtgagctgaactactcactggattccctgaaaattcagggagctgacttcggttctggtaagctgaccatcaagctcgacagactggacgagcaggcgttgaaacaatttaccgacacctaccatcagcaggcgatggacttgttgcagaaatcccagcaactggacccgcagatttatcagcagcaggccaccgcgctgctgctctctaatctgccaatcctgctcaagggcaatccaagcatcaatatcgatccgctaagctggaaaaacagcaaaggtgagagtacgttcaatctcaagctggacctgaaagatccgaccgtagcaacctctcaggcgcagacggaggatcagttgatttctcagctggttagcaacgttgatgccaagctgaacatccctatcgatatggcaaccgaactgactacgcagactgccaaagttgaaggctataccggtgatgacgcagagaagctggctaaacagcaggttcaggggctcgccgctatgggccagatgttcaaactgaccaccctgcaagacaacgcgattaccagcagcttccactactcggataatcaggtggacctgaacggtcagaagatgacgcttcagcagtttgccggtctctttggcgtgtttggtggcccggctatcccggctcagcaggcacctgctcaaccagagactcaggcagcgcccgtccagcctgacgccccggtaccgccaactgtggtgccagcgcagccaacgaaataaaaatgcatgacgcctctaaggcccacttcggtgggcttttttgagtcgattgaaaacgtaacctttgtctacgccgacccacgctctacgattgacgcgttcacgataatatcctgcgtttctagattctgcccaccgatacgcagcagcaaacgtctggcagccgcgtagccaatttcacgcgccgaacttgaaaccgaggtcaaaggcggttccgtgagcgccagttcaggagaatcctcgatgcctatcagcgccacctgtcgctgaaaaaggttatccatcgaactccctgcgacctgatttccggttcgcaatacgccaaaataggctcccagcgccaccgaagccttatggcaaacaatagcgctgattttgggataacgccgaagcagactttctgcggcgtctgccgcatgcccgtaatgataatcgcactcgataatccactcactgcgaaaaggcaggccatactggagcagtgtcgcgcaaaatcccccagacgttcagcccgggttaatgagctgcccagcccaccgagataggcaatctgcttgtgcccgtggcgaatcaggtattcggtagcgatttttgccgcctgcatattgtcaggacgcaccagatcaacgccctcactgccgccagatcgcgaggcgcagatcagcggcacgccctgagcggcggctttttcccgcagactgtgattgacgtgctgaatcccgcccgcaatcacgatgccgtcaacgccgtgggtcaagagggtatcgaaacagcgctccagcccctttccggtcgctccgctttgcaacaggaagataaccttgccttgcgcttcaaacatttcactcagcccggcggtcatttcggcataaaacggctcgcagatatcacgcacgataagcccaatcacgccggactccccgccgcgcagcgaacttgcctgacgattgcgaacaaaacccaactgctcaatcgcctgatttacccgcgcactggtcgcctgcgaaatacgtcctttcccactcaacaccagggagacggtggcaactgatacgcccgccgtcgaggcaacgtcggtgatggtcacttttttggacatcatggcttcccgctcattaagacccgttcctttacctaatccggcagcaatagattaaacgtttaaccttaaaacaggacaaatcaaattttcattgcttaattatgtgaacatggtcaattaaaacccaggtaaaacgttttatcttatcgccggtcgattacctataaattttgtaaaatcaattttccctaagggagtttttatgccagcgagtcgaaaacaacgcgttaccctctgggaatttttccagagtttaggcaagacctttatgctgccggttgccctgctgtcgttctgcggcatcatgctgggtattggcagctcgttaagcagccgggacgtcattaccctgttaccggccgttggaaaccccgttttccagctgattttcacctggatgagcaaagttggttcattcggtttcagctatctgccggtcatgtttgccatggcgatcccccttggcatggcgcgtgataacaagggtgtcgcagcgttctcaggctttgtcggcttcgtggtattaaatctggcaaccaatttttacctgaccaccaaggggatcctgccttcggccgacccactggtcctcaaagccaataatatacaaaatattcttgggattcagtcgattgataccggtattttgggcgcagtcattgtgggcatcattgtttacctgctgcacgagcgtttcaacaccattcggctgcccgacgcgctggccttcttcggcggtactcgctttgtgcctatcgtcacctccgtggtgctcggtctctgcggtttggttgtgccgctgatctggccatggtttgcggcaggcattaccggacttgggcgcttgatccacgacgcaggtatttttggcccgatgatttttggcaccggggagcgcctgttgctgcctttcggcctgcaacatattctggtggccatcattcgctttaccgaagcaggcggaacgctcgacgtctgcggccgcgaagtcagcggtgcgctgaccatctttcaggctcagctctcatgcccatcgacgcacggctttgccgaaagcgcgacacagttcctgtcacagggcaaaatgccggcgtttctgggcggtttgccgggcgctgcgttagccatgtatcactgcgccaagcctgagaatcgtcataaaattaaagggttattgatttccggcgtggttgcctgcgtcgtaggcggcacaaccgaacctatcgagttcctgttcctgttcgtcgcaccggtgctttacctgttgcacgccgtactcaccggattaggctttaccgtcatgtcgctgctcggcgtcaccatcggcaatactgacggcaatatcattgactttgtggtcttcggcatactccacggcaccgcgaccaagtggtatctggtccccgtggtcgcggcgatatggttcgtgggctactacgcaattttccgcttcgctatcactcgcttcaatatcaagacgccgggtagagagtcagacgccctccccgtcgccacgcccgcgcgttcaggcagtaaatcgggctataacgtgcctgaaatactgaccgcactcggcggagcggcaaacatcattaccctcgacaactgcatcacacgtttgcgtctgtcggtgcatgatatgtcgcgcgtagatgacgcgcagctaaaagcccatcgtgcaatcggcgtagttcatcttaacgaacacaatttgcaggtggtgatcggtcctcaggtccagtcggttaaagacgagcttgatagcttgctgaggcagcaacccacagcctcggactctacgccgttaacggtatgatattcctcagggtgagcctgctcaccctgatttatttgtgaggatgttatgtttgattttgacaccccggtcgacagacagggtacctggtgcacccagtgggactatattgccgacaggtttggccgcactgacctgctgccatttaccatctcggacatggactttgccaccgcccctgcattctcgaggcgctgcaaaagaggctgtctcacggcgtactgggctacagccgctggcaacaccccgatttcaccggggctattgctcactggtatcagacccgttttcactgtgccataaaccctgaagcactggtttatggaccctcggtcatctatatggtggctcagctcatccgtcaatggagcgcggcgggcgacagcgtacttattttcaccccgcctacgacgccttttacaagaccatcagcggaaatcagagaaaagtcatctcttcacccttgcaaaaaatcaaccagcaatgggagatggacctttcgctgcttgagactcagcttgccgaacaggagtgcaagattttactgctgtgcagcccgcacaatcccaccggcaaggtgtggacgcggcaggaactggtgacaatcgacaggctgtgccaaaaatatcaggtaaaagtcattagtgatgaaattcacatggacatggtatggggcaaaaatcagcatctgccttggtcatcaatcggtagcggccactgggcgctggtcacctccggctccaagacatttaatatcccggcattaaccggcgcttacggcctgataaatcacgccgctgaccgcgcggcttaccttcagcaactcaaaaacaccgatggcctctcctcgcccgccgtactttccgtattagctcacattaccgcctatacgcaggccgcgccgtggctcgatgcactgcggcagtatctcgaagccaatctgtcgtttgtcgccaggcagcttaatgacgcgtttgccgaactagactggcagccaccgcagtcgacttatctggcctggattgatttacgtccgctaaatattgatgatgaggcgttgcagaccgagcttatcgagcgccagggcgtcgcgatgatgccgggcataacctacggcgaagaggggcgcggctttctcaggctaaacgtcggctgttcacgcgccaagcttgaaaaaggcgttgagaagctgattgcaggtttacaggccgttcgctgaccgtatggtttacaaaatcagcagtcaaatcataactccgtgccagcacccgtcgaaaacgctataatagtttgcactttatcgacaataaaatgggtgctgccaatgattgactctcgtcttccgcttactgatattcaccgccaccttgatggcaacattcgcgcccaaaccattctcgacctaggtcgtcaatttaatatcgccctgcccgccaatgaaattgaagcgctgcgtccgcacgttcaggtcactaaaaccgaaccggatctagtgagcttcctgcaaaaactggactggggtgttgccgttctgggttctctcgatgcctgtcaccgtattgcgcaggaaaacgtggccgacgcggccagagcaggcctgcattatgccgagctgcgtttttcaccgtattacatggcgatgaaccacaaactgccggtcgcaggcgttgtcgaggcggtgattgacggcgtgcgtcgcggctgccgtgaccatgacattgatatcaacctgattggcattctcagccgcaccttcggtgaagacgcctgcctgcaagagctcgacgggcttcttgcccacaaagacggtatcaccgcgctcgacttggccggcgatgaactcggctttccgggcagcctgttcctcgatcatttcaacaaaggccgtgacgcaggatggcgtatcaccgtgcacgcgggcgaagcggccggtccagagagcatctggcaggcgattcgtgagctgggtgcggaacgaatcggccacggcgtgaaggccgcagaagaccccgagctgatggatttcctggctaaacaccagattggtattgagtcatgcctgacctcgaatatccagaccagcaccgtgtctgcactggaaaaacacccgctggcgaccttcttgcgccacggcgtgctggcctcaatcaacaccgatgacccggccgttcaggggatcgaaattgcgcatgagtacaacgttgccgccccggccgcgggcttaactcaggccgagattcgtcaggctcagataaatggcctgacgatggcgttcctgagcgaagcagacaagcagcgaattaacgttaaggttcaggggtaatttaggttttcttaaagataatctttagcgataaaaaagggccagaacagaatgtctggcccttttattttgcgtattgaaacaggcgcttatttaggaacgggcagcgtcttttgctgctgcgccgactgaatacctaactcaatgagctccatgacgcgaatagactgctcggcggtgaccgggttttcgccctgtccgttaatggcatcacgcacaccggcgtaataagccggataattacccggaatcgttaacaggctcttttctgccaacacgccttcatgactcaaggtgaccacgccgtcacgcatgtcatatccccagtcaggctgaggaagacgttcacccgatttaagccggtcttcctgcggatcgaggccgtatttcacatagctccccttttcaccctgcacgatatatcgcgccgtttccgccgcggcataaacggtgctgtgcaatacaacgcgaagacgtgggtaagtgaggacagtattgaaatagtccaccgctttggcgccgggcctctgcattgcctgatccgactgaatagtgtcgggaagcccaaagagttcgagagcctgatcgagcaggtgtgaacccagatcgtaccaaataccgctaccgagctccgcggactcgcgccagcgggtttgtacctcagggcgatagcggtcgtagtgtgattcgaaatagacgatatccccaagagccccttctttgataagcgccttaacggtcaggaagtcggcgtcccagcggcggttatgaaaaactgacagcagctttccccgctcttgcgcgagaatatttagcgaacgcgcctcacccagcgtgacggtaaaaggcttatcgaccaccacatgcttgcctgcttccagcgcctgctgcgccaacgggaaatgggtagcattggggtcgggataaccaccaaatcgatagtcgggtcgttaaaaacgtcctctggggaagccaccacctgcaccgaaggccagtcggcattgactttttcagcattactgcttgataccacggccagttccaaccctggcgtaccggaaatcagcggagaatgaaacgttttactggcaaatccatagccaataagcccaacgcgtaaaggagtcgtcatgatgttatttccctgatcctgcgagtaagaggtgcttcgagtttagcgcaaaacaatcggtgattcatgtcgttaaacggcgttttgaggccaaagaaagccttgatgaatgcgcttgagggtttacggagatacgtaatattacggctaatcttgcgaggaaaacgcttatccacaagaaataatttcgtcattcctaaatatcataaaatacaacaattttattttgttgccgatttaaccttttacactactcttaaaatatttccctggtgtgttagattttacccgcttaatgcgggttttttttatctgcttatcggtgcctaaattctcgttattcaattatagattaaattaataatgccaattccattgccgctcgctgcaagcgtggcaggaacttttcctgcaaatccgcgacgctcatctgtgaagcgtgggttcccacattcattgcggcaaccactccctctttgcgtgaatacatcggcactgccatggaacgcagccctaactcaagctgttgatcgttaatggcaaatccttgagctttaaccttcttcagctcctttcgcagccgttgctcatcggtaatagtgaattccgttagtggctcaagtttgacgcgcgagaaataactgcctaattcctcttcgcttagctcgcttaataacaccatgcccatcgacgtcgcatatgccggtaaccgactgccacgacctaaatctattttcatgatccttttcatcgatgcgcgggcaatataaagaatattatcgccgtcgagtgtagcaacagaacaggactcacctaattgtttacttaaataatcgagagaatattgcgcctgacgggccaattccgaagagttgaggtaggcgtgaccaatggtcagcacgcggggagcagatggtaattcctgttatcgggcgagtaaacgaaccccagtgcgctcagagtatacaggcagcgtctgacgaccgcacgatgcagcccggtcatctggctcaactgcggaacagacatagcaaaaaactcgggactgaaggcctgtaaaaccaccagcccacgggccaacgaggccataaaatcggggtctcccttatagcgaacgttcgccagttcactgacttcctgcacgcgcagcagttcagcctcgctaatcctgtagggctctttcattagtcactccctttataatcaacaggttaaatagttaacttactaaactcatccgctgtttttccaagcaacatcacaattttatcacatatttaacgattgtttcgataatcgcacaaagtattgatattcgcacttgttgatgttccccgcgtgacttaagttaaatacacataccgtttgagaggacaaaacgacgatgattaacaaagtgatccagtcagcagatgaggccgtggcggatatccacgacggcgcggtcctgatgattggcggctttgggccagcggggcaacctactgaattacttgatgccctaatccgccttggcctcagggatctgaccctgatcagcaataacgccggtaacggtgattatgggttggcggcgctgctcaaggccgggtgcgtgcgcaagataatctgttccttcccacggcagactgactcatgggtgtttgaccaattgtatcgtgagaagaagattgagctggaactggtgccgcaaggcaatctggtcgcgcgcattcaggcaggcggttcaggcatcgcggcgctctacactccaacggcgtacggcaccgaattggccgccggaaaagagacccgagagttcgacggcgttcactatgttcttgaaaccgctctcaaggctgacttttcgctgattaaggcccttcacggcgatcgctggggcaatctgaccttcaacaagaccggtcgcaactttggccccatcatggcggccgcgagcaaatgcacgctagcgcaggttgataagttggtggctctcggtgagatagatcccgagaacgtgataacaccgggcattttcgttaagcgcgtggtgcaggttcatccacagccggtcagcctgacggcataaggagcttttgtgaatacgctaaaccacaatcaattagcagaacgtatcgcgcaggacatccccgagggagcctgcgtcaatctcggtatcgggctgccgaccctcatcgctaactatctgccctctgataaagaaattttgctgcacagcgagaatggcattttggggatgggtccaaccccgccgaaaaggatatcgatcccgaactgattaacgcgggcaaacagccggtaacgttgctggcaggcggatgctttttccatcacggcgactcctttgccatgatgcgcggtggccatctggatatttgcgtgctgggcgcctatcaggtgtcggtaaagggtgatttggccaactggagcaccggggcaaaagattcgattccggccgtgggcggcgcgatggatctcgccattggcgccaaaaaggtctacgtgatgaccgaccacctgaccaagaaaggccagtgcaaaattgtcgaggcctgcacttacccgcttaccggcatgggctgcatcgaccgaatctacaccgatatggcggtgatggacgtcacccccaccggtattgtggtgaaagagctttttggggatgtcaccgccgagtatttgcaggaggttacaccggtcaaactgaccttcgcgctgaagaataaagaggtgtctcatgtctgatgcctacgtttgctacagcgtccgtaccccgtttggccgacttaacggcagcctggcaaacgtgcgcgccgacgatttggccgccattcctctgcgggcgctgattgaacactatccccatctcgacctcgaggctatcgatgacgtgctgctgggctgcgccaatcaggcgggtgaagacaatcgcaacgtggcgcgtatggcctcgctgctcgccggtttcccgactagcgtgccaggttgcacgctcaaccgcctctgtggttccagcctcgacgctgttgcgaccgccgcaagggctatcaaaagtggtgaatgtgacctgatggtcgcgggcggcgtcgagagtatgtcgcgtgcgccctacgtgatgggtaaagccgagtccgcgttcagccgccaaatgaaaatcgaagacaccaccatgggttggcgctttatcaatccggcgatgaaaagccgctacggcgtggaatcaatgccgcagacagccgaaaatctggcgcgtaaatacgccatcagccgagggatcaggacgcattcgccctgcgtagccagcagcgcaccgccgaagcacaacaaaatggattctatgacccgcagattgtggcggtgacgattccaggggtaaaaaagaaccctcgatggccttcagtaaggatgaacacccacgcgccacctcactggaaatattaagcaagttgaaaccggtggtcgacgtcgaaggaaccatcacggcggggaatgcctcaggactgaatgatggagcctgcgccctgctgattgccagtcaagccgcactgacgcgtcatgaccttcagccgatggcccgcattgtcggcagcgccaccagcggcgtagaacccagcgtaatgggctttggcccggtaagtgccgtccaccgcgttctcgaaaaggccgggctgaccctgcaacagatggatgttatcgaactcaatgaagcctttgccgctcaggcgctgagcgtgacccgcgccctcggcctgcccgacgacgccgagtggattaaccccacggcggtgccatcgcgctcggccatccgctgggtgcatcgggcggcaggctggtgatgaacgccgcgcatcagttgcaaaaagtgaaaggtaaatatgcactgtgcacgatgtgtatcggcgtaggccaaggcatcgcgctgattctggaaagcgtctgaggagacagatatggatctcgaataccgtctcgacggcccggccaacgcgcctgtattggtgctgtccaattcgctgggcaccacctggacgatgtgggacgcgcagtttaccgacttcaataaatatttccgcgtgctgcgttacaacacccgcgggcacggtaactcgccgctgaacggcgggaaaatgtctctcgcctcgctgggcaaagacgtgattgacctgatgaatcatctcaatatcgaaaaagccagtttttgcggaatttccctcggtgggatgaccgggatgtggctcaaccgccattaccctaaccatttcaaccgtttggtggtggcaaatacggcggccaaaattggcgacaccgatgcctggttgacgcgggcgaaaaccgtgcgtaccgaaggcatgcagtctgtggccgacggttcggccagccgctggttcaccaaagactatatccgtgcacgccccggtatcgtcgatgccctggtcgacggcattgagcaactcgacccgttgggctatgccgcctgctgcgaggtattagcctacgccgacctgcgtgaagaggtggcgaaaatggaacgccccatgctggtgatagccggggagcatgaccccgtgaccacgctcgccgaggcagagtggatcatagaacgcgccagcgatgcacaaatatgtctcgttcccgcttcacacttatcgaatattgcctgtccggtgatgttcagccgacagacgcttaactatctgacttcaggagctacacatgtcattaacgattaacgccattgagtgctggttggtggatattcccaccattcgtccgcacaaactttcgatggtgaccatgggctgtcagaccttgaccctcgttaaaatgtcctgctcgggcggcgtggttggctggggtgaggcgacgaccatcggcggtctgagctatggaccggagagtccagaggccatcaagtccgctatcgaccattatcttgctcctctcctttgtcatcagccgtttaccggggtcgaggcgctctcgcgcaaaatgaattcggtggtcaaaggcaatacctttgccaagtcggcgctggaaaccgcgttcctcgatgcgcaaggcaaaacgctgaatgtccggtgagcgaactgctgggcggaagattgaccgatgaactgccggtgctgtggacgctggcgagcggcagcactgagaaagatattgatgaaggacatcgtctgattgccgaggggcgtcaccgggcgtttaagctgaagatcggtgccaatgcgctgcaaacagaccttaagcatgcgttagctatcaagaccgcgctgggggaaaacattccggtacacgttgacgtcaatcaggcgtgggacatgacaacggccctgcttgctattccgcaactgtttaaaggcgggattacgatgatcgagcagccgattcctttgcacgaccagcgtaacctgattgccctgagccagcgcgtcgaggcaacgcttctcgccgatgaggccgtacccgactatcactgcggattctcactggccagtggcggtttcaccggagcctttgccctgaagattgccaaggctggcggcccggcgcaggtcatcaaactggcacgcgttgcccaggcggcgggcatttcgctgtatggcggcaccatgcttgaaggtacgctgggcacggtgagttccttacacgcctggtcgacgcttgagatgaaatccggcaccgagatgtttggcccgctgttattaaaagacgatattgtggtgaaatcgcttgaatatagaaatggtcacgtagtcataccatcaggtccgggattaggtgtggaaatagatacagataaacttaagcactattcgcgtaacgaataacacaaggagtccagtaaattaaattttattaataagatagttaaatcaatagtgacaaggagaaatttaaaatgttatttcaggttgatatggtcgttaatattcccgattcactgcccaaggaacaggcagatgaaattaaggcgcgagaaaagctatactcgcaaaaattacagcacgagggaaaatggcgtcacatttggcgcgttgcggggaaatatgaaaatatcagtatttttgacgtcaaggataataccgaacttcatgaaatactgaccggactgccactgtatccttatatgaccatgacgatacgtccgctttgccgtcatccttcgtctataagagataacgataagtaataatttggcctgtaccctacaatgaggattaagctatgtcacataatataataaatccagctgagctggaaaaactactcaacataagctgcggtctcgacactaaacaaggtaatccacgtttcaaagctattttgcattgtttaatgggcgacgtttgtcgcaccattgacgaatttgatattaccgacgaagagttttggcaggcggtcaattatctcaacgtgctgggtgagcgcaaagaggtggcgctcctcgccgccggcctgggactggagcatttcctcgacatgcgcgccgacgccaaagagaaggccgcgagcctgcacggcggaacgccgcgcaccatagaagggccgctgtatgtcgctaatgccccgttgagcgacaagtttgcgcgcatggacgacggcaaagacgacggtgaacccatgtggctctatgggcaggtgactgaccctgataaccagccgattgccggcgcggtggtcgatatctggcacgctaatacgctgggtaattactcgttcttcgactcgtcgcaaaccgactataacctgcgccgccgcatcaaaaccggccccgacgggcgctatgcggtgaggagcattattccttctggctacggctgtccaccggatgggccaacccaggcacttttgaatcacgtgggtcgccacggtaatcgcccggctcatattcatttctttgtttctggtccaggttttaagcatctgaccacccaaatcaatttaagcggtgacccctatttatgggatgattttgcctttgccacgcgcgatgagttaattgcagaccctgttaaagttacagacgaaaaaatagcccagcagcgtgatattcccgtatcacacacagaggttaaattcgattttaaactcacccccgttaccacgactgaggagcaagtaagaataaaaagagaaagagccatggaatagcgcacttaatgttcttgccttgagaacaagttaacgcccttcccctattttacagcaaagaggaattaagatgagcgaaattatttcgcagcgttcgcgcacgcttgaagaaaaaataaataacgcccttattatcgataaagaggccggtatttataaatgtcatcgcagtatctttaccgacccggaattattcgagttagaaatggaaaatatatttgaggggaactgggcgttccttgcccacgaaagtcaaatcgccaaccctggcgattattatactctcacgctaggccgccagcccatcatgatcactcgcgataaaagcggagagttaaacgctgttattaatagttgttcccaccgtggcgcgatgttagcgacccgaaaaacgggcaataaaagctcatttacctgtccgttccacggctggactttcagcaataacggcaaactgttaaaagcaaaagatgaaaagaccggaggctatcctccctgctttaaaaaagaagggtcgcacgaccttaaagcgctgccgcgtttcgccaattataaaggtttcctgtttggcagcctgaatgacaacgtctgcgaactggcggaatatttaggtgacaccaaacaggttatcgacctgattaccgatccagccgaagaaggtctggaagtggtgccaggcacctcgagctatacctatgagggcaactggaagctacagatggaaaacggagccgacggttatcacgttagcgtcgttcactggaactacgcctctaccatgtctcgccgcaactacgaagaaaacgccacccacaccgtagacgccaacggctggtcaaaaagtgaaggcggcgtctacggcttcgaaaacggccatatgctgctgtggaccaaggtgctgaaccctgaggtgcgccctatctataaacatcatgagcggctcaaacagcagtttggcgaggcgaaggccaatctgatggttaacgagacccgtaatctgtgcctgtatcccaacctgtatctgatggaccagttctccactcagttgcgcatcgtcaggccgattgcggtcgataaaaccgaggtcaccatcttctgcttcggcacgaaaggcgaaagtgacgaagaccgtgcgctgcgtattcgtcagtacgaagacttcttcaacgtcagcggtatgggtacgccagacgatctcgaagagttccgtgcctgccagaccggctataacgggcacaatctgccgtggagcgacatgagccgaggtgcgacccgctgggtcgacggtgcagacaacaacgccaagctaatggacatttctccgctgatgaccggcaccagcgccgaggatgaagcgctctacatcacccaccaccattactggcaacaaaccctgcttaacgctctaagccagcgcgacaaggaggcccactgatgtcttcactacaacagcaaattgagcaatttttttatcgtgaggcacgcttgttggacgaccgggaatggatgcatggctggagtgctatcacccgcataccgagtactggatgccggcctggggcgatgacgactgcctgaccacggatccgcagcgtgaggtctcgctgatttactaccacacccgcggcggcctggaagaccgtgtctatcgcattaaaaccgaacgttcggcggcaagcacgcctgagccgcgcaccacccacctgctgagcaatatcgaggtgttgagcgacgaaggcaatcaggtcgaggtccgttacaactggtgcacctacagccatcgctataaaagcgctgaacacttctttggcaatacgcaatgcaccttggtaaaagccggtgaaagcttccagattaagcgaaagaagatccagctcaacaacgactacatcaatcacgtcattgatatttatcatttatagaggtggaaaatggcttataccatcgcgctcaattttgaagacggcgttagccgcttcatcgaatgcaacgaaaacgaaaaggtgctggatgccgcctatcgccagcaggtcaatctgccgatggactgctccgacggcgtctgcgggacctgtaaatgccattgcgaatccgggatgtatgacctcggcgacgagtatctcgaagaggcgttgtcggaacaggaattcgaagacggtcaggtcctgacctgccagatgatcccgaactcagactgcgttatctccgtgccgctctcatcgcacatgtgtaaaaccggcagtgaaacctataccgcccaggtggtacgcgccgaatcgttgtccgacagcgccatcgaactgaacctcgaactgaccagtcatcttggagtcccgttcctcagcgggcagtatgtcaacattcagctaccgaacagtcaggacacccgagcctattcgttcagctcgatgcccggtgaaaagacgctctcttttcttatccgcaacgtgcccaatggccggatgagtcaatatctgaccacccaggccaaaccgggcgatgttctgaatctgaccgggcctcagggcagtttttatttgcgtgaagtcacgcgccccattctgatgctggccggtggcactggcctcgctccctttctgtcgatgcttcaccaattgcaggggtccgggctcaagcataaggtgcatctgatttatggcgtatcacgtgacgtcgatacggtaaaactggcccagcttgaggcctttgcggcgcaaattccgcagttcagcttcagcgtttgcgtgaccgaccctgcgtcttcagccgagcttaaaggctatgtcaccgaccatatcgagccgggtcagatcaatgatggcgaggttgacatctatctctgcggtccaccgccgatggttgaagccgtgatcacgttcctgaaatcaaaatccattaccccgcgcaacttctactacgagaaattcgcgcctcaggtgagcaaagagaccgcttaacatgacgaatcaacgttttaaagaccgcgtaatggtcattaccggcgcggcacagggaattggtaaagccgttgccgaacgggctgccgcggaaggcgcaaaactggtgcttatcgaccgtgcagaatgggtcgataccctggcgcagcagttacgggagaccggcagcgacgtgctgtcgctcagggctgacctcgaacagtgggaaagcacggccgccgcctttgaggaggcgcatcagcacttcggcagactggacattctggtaaacaacgtcgggggcaccatttgggcgcggccttatgctgaatactcgccgcagcagattgaggccgaaatccgccgctcgctgtttcctacgctgtggggctgtcgcgccgtgttgccttacctgctcgaacaacgctacggcgcgattgttaacgtctcctctgtcgcgacgcggggcgtgcatcgcgtcccctattccgcgtcgaaagggggcgtcaatgcgctgaccaaatccctggctttcgagtattctggaaccggtatcaggattaatgcaacggcaccgggcggactgatgccccggccagactgacgccacgtaaccaggaaaaaccgaccgcacaagaaacagagtggtatcagggcgtggttaatcaaacccttgaaaccagcctgatgcatcgctatggaaccgttaccgagcaggcggcggccatactgtttctcgccagcgacgacgccagctacattaccggcaccgtattgcccgtggcgggcggcgacctcggctaaagagcgcataaagcaagacggcccgcgatgcagtatcgcgggccgtctttacacatgaagcctttttagaaaaaacttagaacgaacggtggaagttaaccaacggcagaacaggtaccgctgcgttggtcgccacgttgatcagaccaatctgcagaccttcaaggtctttggtggcgttgaacagaccaaactggaagtgggtgctgtcagcatagttaatcacaccaatatcggtggtgctgtcggctgacacgttgattgcacccaggttcaagcctttaacattgtgggaaatgttgatggcaccgaggttcacaccggtcacgtcgtgagagaagttcagagcaccgacgttggcaccctcaacgtcccaggcgacgttcgctgcacccagattaagacccgtcacatcccaggtacggttgaaggcagaaacgttggcaccggtcacgttttcagaccagttgaaggcgctgaggttggcgccggtgacgttgcctgatttgttcactacgccgaagttcaggccggtaatgttgccttcgctccagttaccgattgcaccgatgttcaggccggtgacgttgccggtatggttaatcacgctgacgttggcaccggtggtttcaccggtggtccagttgaacgggctgacgttcaaaccttcaaccgaaccctgggtgtagttgcccacaccggcaaggttcaggccgttcacatcggccgtcatgttggcaatgccgaggttaacaccgtcgatgttttttgcggcgctgtagataccgacgttgacaccgttgaggtcacccacctggttagcgaggctcaggtttagaccattgtcttcgccaccgtgccagttgaacaggccaatagccgcaccgttcatgccgttacgaatgtgagaaccggccgccgcaccgagctggaagccgttcaggtggtcaatctcgtcataaccgaggattggcaggtcgaaaccgtttaccgtgccagtatcaccgtacaagaatgtgccgtgaaaaccattgacgtctttgtccgctgggaaattaccgaaagacgatacttgcacgggtgccgcattactcattgcagaaaacattgtgcaggaaagtaataaagctagagttgaacgtttcatttcctctatctctctttattttgatttgttattaaccgggttgctttgcaagttccagtacccctatttttgctcaagcgttaacgttaagctgggaatgagcatgaccccgcaaacccttggtatcttatcaaaaaatgcttgtttcccgctgatttcgcccgttttcgcactcagagacaataaacaggacacaattaaagcggactaatcacatatagtgatagtctcacccagacaaaagaataaatattaaacagcgtaggctcgatgttacaaaatatattaatcagaaattctttccacaataagcgatatatttaatgggatttaaattatatttaaccgtatattttaaaacgcagaagggactaattattggaagttacaagaatgaggcgggaacaacgaggggtcttgtggaaccctcgttggcgaggctgggacagcgcccaacctcagcgtcagacgctgttctgagcaaaaagcgttgcaatcaaaaatcagtaattataggtggcagcgttttcattctcaggccacggatgcgaccgataaggcttcgcagggtaatttatctcaatgctgcgccgacggaaatcgctgggacttacgccgacccgtttacggaaaacgcgagaaaaatagagctgatcgtcgtaacccacgacccggccaatggtggctatcgattcctgggtcgtttgcaacagcagtttggcgcggataacccgttggtcctcccgccagcgcaggatattaatcccaacctgctcgcggaacaggtgcgccagccgcgaaggagaaaggcaaacgtggcgggcgacttcgtcaatacgcaactctccggccagattgccggtgataaactgacaggcctcgataacgcgcggatccatgattttctgcggactctgcgggtcttcttccatcgcacgcagcagcagcctttctaacaaattcatccccagttcttcgccgaaacgacgaccggacttttgcgtttgttcgatattggcaaacaagcggtcaaattccagcagcagggtattgttgggcagagaaagacgaccgacgtcgcgggtcttggtgtgccattccagccagtcggcccagtaggcacgagggcggaaatatacccaacggtgataccaacagtcgctgttggacgagcgtgcatagagatggcgcgccttgggcggaaacagcagcaaatcgccgggattacagtaaaacgtgtcttcgccgtcgaacaccttgccctgccctttaacggtcagattaaggatgtagcccttcatgccaccgggccggtcgatggagaaatcaagcggcccgtcggccaaaatgggcgtcatgccggcgaccagatacgcgttgaaactgtagccgggagtagcggattggactgctggtcctgaatcatgcggtgatacatcgggcctccttaaatcgtcacgctggtctaaccattctatcgggcaatagaattactgcccgtttgcgttaaagaaatgtgaaggaaatacacttttctgagcatttatcacaccaaaggcccatttaaaaactggaatcgtttacacagcgcgtttcgctttctgtttgtagcggtcaaaaatcaccgccgcgagcaggatgaggccacgcaccacgtactgcgagaagggggaaatatttaaaagattcatcgcattttcgacggtgccaagaatcagcacaccggcgacaacataggagattttaccgatgcctcccttgagcgacacgccgcccagtacgcaggccgagataacgatcagctcatagcccagcgaagtcatcggctggccgctggtcatgcgcgaggccaggataatgcccgccgccgctgagaccagccctgacaatacgaagatgatgattttagtccgcaccaccggtaccccggccagacgtgcggcttcctcattaccgccgatcgccagcgtattgcggccaaaggtggttttgttgagcaacagaccaaaggctatcaggcaaccgacggttatccagataggggcaggcaggccaagccagttggcgtagcccagctcgaagaagcgttcgtcttcaatgcccaccgctttaccatcagaaatgatataggccaggccgcgcacaatttgcatggtggccaaggtggttatcaaggcgttgattttcaatcgggcaatcacgaagccgtttaccagcccggaaagcacgcccagcagcagacccgccgccacgccaatccacaggctttccgtcatgttgataaccacggcggtggtgaccccgcacaggcaatgactgacgcaaccgacaggtcaaaatcgccggaggccaaacagaacagcatgccgcaggccaccatgccggacattgagatggccagccctagccctttcatattgataaaagagctaaagttgggcacgaaaatcgagcaggcgataaacagcgcggcgaacaccaccagcatgccgtagctgtcccagatgcgcatcaggttttgcccgctgcgcgcggcagcgttcggctgttcgggtttggtagaattggttgtcatactggacatcatttaactcctgcttggaccgcgtttaggccgcatccggggtggtttctggatttaatgtcggggtacgcagcatcgccatgcccagcgctttttcttccgtagcctggtcgtgtgtcagctcgccggaaagcgtgccttcgcgcatcaccagaattcggtcggccagcccaagcacttcaggcaggtcgctggaggcaaacagcacggcaaccccctgttttgccagtgcataaatcacgctataaatctcgtgtttggcacccacatcgatgccgcgcgtcggttcgtcaagcaagatgaccttcatgtcttccgacaaccagcgccccagaatagccttctgctgattgcctcctgacaggttcatgatcagctgctcggcgctcggcgtcttgatgttcaacgccttgatttgcttgccggcattgtccgtctcccactgattattgatcaagcatccgaccttcacgctcttgcgtcgcgcgctgatgttgatgttgtctcgcaccgagtgcacgggaattatcccgtcggccttacggtcttcggggcacagcataatgccctgacgaatcgcgtcgatcggggtgtttatcttcaacggctggccgtcgagcaacaccctgccgcgggttattcgggtgccgccaaacaggcctttcatcagctcgctgcggcccgcgccgaccagcccaaacagcccgacgatttctccctgtcgtacgctgaggctaatttctgacttcacgcccggcgctttcaccgcctcaagctggagtcgtacctcacccagcggtcgtggttgataatcgaaaatatcgccaagattacgtccgaccatcgcctgcaccagaatatcgttgtcgacctgctgcatgtcgtcgaaggtgcggacataacgaccgtccttaaacacggtgatggcgtcactcagggcaaaaatttcctccatacgatgcgagacataaacgatcacccgaccttcggatttcagctcgcggataactctaaacagctgctcaatctcgcgcgcagacagcgagctggtcggttcatcgaaggcgataaccttggcgtttcgcgccagcgccttggcgatttcgaccatctgccattggccgatcgacagatatttcaacggcgtgtcggggtcgatatccagcccgagatgttcgagctgaagttttgcctcgtagcgcagcagcttgcgattcacccagccgcgtcggctcggcaactggccgagatagatgttctctgccacggtcatctccggcaccagatgcagctcctgatagataatcgccaccccggcgtccagcgcgtcggtggtgttgctaaaagtgaccggctgcccttttattaagatttgcccctgagtcgggctgtaatacccgctcagaatcttcagcagggtagatttccccgcgccgttttcgcccatcagggcatggatctgccccgcgtagcagttgaagctaatgccctccagcgccttgacgccgggaaaggttttgccgatcccctcaaaagtcagatagggctggcggacgtcgaatgcctcaatcgaagggttgagcgccgttgatgacggggtcgagagcaaagtcatgttacttgcctcccaggcctttcttgtcgagttcagccttgaagttgtcgcgtgttatcagcaccacgtcggtgacttcggtgaacttcggcggctcaacgcctttggttacccagttattcagcatttggatacttttataaccgtgtacgtccgggctaggtaacagcgaaccgtaaaatccggtctgttcatttttggaaagctcgttaaccgcgtcaacgccgttaataccgataccgatgacgtttgcggccttgaagccctgcccttcggtcgcacgcacgccgcccaacacggtgttgtcattcatgcccagaatcagccaatttttcacccccggatgctgtaccagcagggagttgcccgcgtcgagtgcgcccggaatatcgttggacttggtcggaactttgtaaatctgcgccgccgggaaaccggccgccttcagagcgtccatcgcgcctgtggtacggcggcgagcggtatccagctcatcggcggtaatcgccatgacgccggtatcggcaaccttccagccgcgtttttgcatctctttatacaactcctgtccctgatgctcgccaattttactcgccgccatcatcaccaacggtacgtcctccatcggcttgcccttggcattcacaaactggtcgtcgacggcgataaccttcaggtcatagcttttagccttggccataattgcaggcccaaggcgcgggtccggcgtacaaatcacaaagcccttcgcgccgtttgccgcgagactgtcaatggcgttcaacgttttctcaccgtcgggcacggcaatcttgataacctggaagccgagatctttccccgccttgtctgcaaatttccattcagtctggaaccagggttcttcgggttgtttcaccagaaaacccagcttcagggtctcggccatagccgaatgtgacataaccgcagccagtccaactgccgccagcgccttagtgaatttatgcatgatgctctccgacttcttattgttgttagccccgtcattcggcgggactgtgaaaacgttatcagtagggtgcttccaaaaaaaccaccaataaaccttgcgatacgtagattcattaatggattcagataagacgaactcagttttagccggattgctttctaaataggtagagcgctatcacactttaaaattgcagccatttagtacatatattcagcaaaatcaccctcaagtgaagttatgacccgcttcacataacctcaataaggagcagaaaagtacatacttccagcaatcgtctcctcactgcctgacgacccgccctcctatggttatcaacagtacacgtcgcctgcgttttgggacgacctgcaccctataaacgtgtcaagtagcttacctttggggagataaccatggcgcaaggcgcaattgctcttggtctggattttgggagtgactcggtccgcgtactggccgtggattgtcacagcggaaaagagatagataccgacgtggtgtattacccacgctggcaggaaggcctctactgtcaagcgggaaaaaaccagtttcgccatcaccccctcgactatatcgaggcgatggaaacggcaataaacaatctcactgcgcgcctcggccgtgaaaccagcgcacggattatcggcatcggtgtcgattcaaccggttctacgcctgcgccgattgacgcacagggacaggttctggcgctgaggcccgaatttgccgacaacccgaacgccatgtttgtcctgtggaaagaccacaccgccatcaatgaggcggaagagatcaaccgcctgtgccgcagcggtgacttccctgactacacccgctacatcggcggagtgtattcgtccgaatggttctgggccaagattctgcacgtctcgcgcgaggaccgcgccgttcgcgaagccgcggcctcctgggtcgaactctgcgactgggtgcccgccctgctttcaggcaccaccgcgccgcagtctcttgcccgaggccgctgcagcaccggtcacaagatgctctggcacccttcctggggaggattcccgccgcgcgatttctttatggcactcgaccggacgctggttgagaacctaccttatccactgtttagcgagacgcaaaccgccgaaaaacccgttggcaccctcagcgccgagtgggcagaacgtcttggcctctcgcagcaggtggtgatttcgggcggcgcctttgactgccatatgggggcagtcggcgccggtgcgcagccttatacgctggttaaagtcattggcacctcaacctgcgacattctgattgccgacaaacaacgcgtcggcgagcgcgccattgccggcatttgcgggcaggttgacggcagcgtcgtgccggaaatgatcggtatggaggccggacaatcggcgttcggcgacatgtatgcctggtttagccagctgctgagctggccactggtgcagctggcggccagacatccggcgctcagaccgcaaatcaatgagatgaaaaagacgctgctggcggacctgaccgccgcctgggccgctaacccttctctggacaccctgccgctggtgctcgactggttcaacggtcgccgcacgccgtttgccaaccagcgcctgaaaggggttatcaccgatatcaacctcggcacgcaggcgccagagctgtttggcggcttcatcgccgccaccgcctttggcgctcgcgccatcatggagtgtttcgagcagcaggatattccagtcgagaacgtgctgaccctcggcggcatcgcgcgtaaatcgccggtcatcatgcaggtttgcgccgacgtgatgaaccgtccgctgcaaatcgtcacctcagaccaatgctgcgcactcggtgctgccatctttgccgcctgcgccgccggagagttcgactccgtgccgctggctcaggccgctatggcctgccgtatcgagaaaactctgctgccccacccgcagcgtgccgcccagtttcaacaactttacgaacgctatcagcagtggtgtcaggcatctgaaccgttgtttagtgccgccaacccggcttgatttttctcgctggtttgagaccagcggccaatttccctcgtgcaggagtatgaagaatggacgtatttaagcagctcgaagtgtggtttgtgataggcagtcagcatctttacggtgccgaaacgctgcggcaggtgaaagaaaatgctgaaaaagtggtgaatggcctgaacgcctccgccggtcttccggtcaagctggtgctgaaaccgctggccaccaccccggatgaaattaccgccgtctgccgcgacgctaactacagcaacgactgtattgggattatcacctggctgcataccttctcaccggccaagatgtggatagccgggctgagtattctgcacaaaccgctgatgcagtttcatacccagttcaacgccaccatcccgtgggactcgatggacatggactttatgaaccttaaccagacggcgcacggcggccgcgagtttggttttatcggtgcgcggatgcgtcaacagcattctgtggtgaccggccattgggaggatacggaaagccatcgccgcatcgcacagtggatgcgcgtcgcagcggctaagaatgagagccagcacctcaaggtggcgcgttttggcgacaacatgcgccaggtcgcggtaaccgagggtgacaaggtcgccgctcagatgaagtttggctataccgtgagcgcctacgggataggcgatttggttagcgtgattgatgaggttagccggggcgacgtcgataccttgattgaagagtatgaatcaagctatcaacttaccgacgccgtgaagctcaatggtccaaaacgcgagaacctgattgatgccgcccgcattgagcttggcatgacccgcttcctcgagcaaggagacttcaaggcctttacgaccaatttcgaaaacctgtatggcattaaacagctgccggggctggcggtgcaacgattgatgcaaaaaggctatggctttggcggcgagggagactggaaaaccgccgccctgctgcgcatcatgaaagtcatggccagcggactcaaaggcggcacttcctttatggaggactacacctataacttcgagaccggcaatgatttagtggtcggctcgcatatgctggaggtctgtccgtcgatagccagcgcccagcagcccattgtcgatgcgcagttcctgggtatcggcggcaaggcagaccctgcacggctgattttctcgactccggccggtcctgcggtcaacgccagcgttatcgacatgggtgaccgtttccgcctgctggtcaatctggtggacaccatcgagcagccgaaaccgttgccgaaactgccggtggcgcgcgctatctggaaggctcagccctcgctagctacggcggcggaggcgtggatcctcggcggcggtgcacatcatacggtgttctcacaggcgctggacgttgactatctgcgactctatgccgagctatacaacatcgagctgcttgttattgataacgacaccacgctgcctgactttaaaaatcagctgcgctggaacgaggtttactacaaactttgcgctaactgagcgcttttccctcccttaaaataaggttaatagacaggcagagtcattgactctgcctgtctttccggcgctcaaaatgggctaacgcgcaaagctttattcttgccttcctcaattgaacaaatcaccagcactattctcatttttaaggcaaaaagtgatattttttacgctgttgcgctgcaatcacatgaatacgatagagacgaacactttctagcgttaagctatcgcgccttgaatgtctaaatccgccttttgttgcagcggtattaactactgcctcaggctggattgtcgtcaacacgattggaataaggtttcatatgtctcttaattctggctatcagcgtattggcggctggttattggcccgatggcttacctgattgtcaatttgatgagtgtggtcctgatgctgctgctttattcaatggccgtgtttgagcccgagtcgcgcaagtatttaatcacccactctcaggcgtttaccctacagtggtatttctcggtggtgacgacgctggcaatgggagcatttaccctcagcgtgctgtggtcgttctgcagaagaatgaaatcgctgccaagactttatattctctggctgctctttaccgtcctgttggctatcaagacctttgccttttcgccaatcagcgacaatctggcggtgcgaaatttactgataccgcttctcgcggcggcgctgttggtaccctatttcaaacgttctcgccgcgttaaagagacgtttacgcagtaaattagccttcgggtaacgggttcgaaaatttaaacgtattcaactattttctggcaatttttaggcactatcatgacatcatacttattactgtttattggtaccatgctggtaaacaacttcgtactggtcaagtttcttgggctctgtccatttatgggcgtctccaaaaaactggaatctgctattggcatggggttagccaccaccttcgtcattacgctgtccaatatttgctcatggattgtgaatacctttatcttgatgcccctgggcctggtatacctgcgcaccatggcgtttattctggttatcgccgttgtcgtgcagttcaccgaaatggtggtgcgtaaaaccagcccgtcgctttaccgcctgctgggtatcttcctgccgcttattaccaccaactgtgcggtgcttggcgtggcgctgctgaacatcaaccagcagctcaactttatgcagtcggcactttatggcttcgccgcctcgctcggtttctcgctggtcatggtgctgtttgccggtattcgtgaacgtctggtggttgccgacgtgcccgcccccttccgggttcttctatcgcattggtcaccgccggcctcatgtctctggcctttatgggctttaccgggctggtgaaattctaatgttcgaattatgggttgctattggttcactcagcgcactggcgctggtgtttggtttgctgctgggctacgcctctcgccgttttgcggtggagggaaacccggttgtcgatcagattgacgatatcctgccacagagccagtgcgcgcagtgtggttaccccggctgcaagccttatgccgaggcggtcgctaacggcgataaaattaataaatgcgtgccgggcggcgaaccggtcatgctgaaacttgccacgttgctcaacgtcgatcctcagccgatggacggtgacgtcgttgaagccgtgcccgtacgtaaggtcgcctacattgacgaaagcaactgcatcggttgcaccaagtgtattcaggcctgtccggtagacgccattgtgggtgcgacgcgtgctgttcataccgtcgtttctgacctgtgtaccggctgcgacctctgtgtcgccccctgcccgaccgactgcattgaaatgctgccgattaaaaccaccaccgcaaactggaaatgggatatgaacaccattcctgtgcaaattattcatgcggagtaacatgttcaatctgttttctgcgctcaagaaagagaagatctgggactttgacggcgggatccatccgcctgaaatgaagacccagtccagcctggttccgctgcgccggatgccgcttcctgagcgtttcatcattcctttacagcagcacctcgggccggaaggcgaactttgcgtgaagcctggcgacagagtcagtaaaggccagccactgaccaccggacgcgggcgtaccgtgcccgttcatgcgccgacctccggcatgattcgcgccattgagccgcacatcaccgctcacccttcgggtctgaaagagctgtgcgtgatgatcgacgccgacggtgaagaccgctggtgcgagcgtgaggcggttgccgattacacccaactcagtgccgacgagcttaatcagcttattcatcaggccggtattgccggtctgggtggtgcaggctttccaacggcaagcaaaatccagggaagcctgaaacacaccaaaacgctgattctgaatgccgccgagtgtgagccttatatcaccgccgatgaccgcctgatgcaggaacacgctgacgaaattcttcagggcacgcgtattctctgccatatgctgcacccagaacaggtgctgattggcattgaggacaataagccggaagccattgccgcgctgaaagccgccatcaagcatgaaaaccatccaggcgtgaagattgagctgcgcgtagtgccgaccaaatatccttcgggcggggccaagcagttgacgcgtattctgaccggccgtgaggtgccaaagggcaagcactcttctgccattggcgtattgatgcagaacgtaggcaccatttttgccattaaacgcgccattatcgacgctgagccgttgattgagcgcgtggtcaccctgaccggtgaatcggtcaagaaaccgggcaacgtctgggcgcgactcggcaccccggtggccgagctgctgcgcgaggctgagtttgttccgcagaacaagcaaaaaatggtcatcatgggcggtccgttgatgggctttaccttgccgtcattggatgtgccgatcgtcaaaatcagtaactgccttcttgccccttcagagagtgagatgggggcgcccgagccggaagaagcctgtattcgctgcagtctgtgcgcagaatcctgtccggctggcctgctgccgcagcagctgtactggttcagccgcggtgaagaacacgagaaagcgcgcaatcacaacctgttcgactgtatagaatgcggcgcctgcgcctatgtttgcccgagtaacattccgctggtgcagtactaccgccaggaaaaggccgaaatacgcgccctcgatctcgaagccagccgtgccgccgaggccaaggctcgctttgaggccaaacaggcgcgaatggaacgcgaaaaactggcccgtgaagagaagcacaagaagtctgaggtcaaactgagtgcggaagaaaccgccgcactgaaacctcgcgtcagcgcagcggcaaacgttcaggaaccggtggccgagagtgaaaccccagccgcggattcgcgtcaggcggctctggccgccgctatcgcgcgggctaaggcgaagaaaaccgccttagccgaggctgtcgaagacgtgccggtatccaatgagcctgtcactccgcccgctgatatgccggtagaaggtgacagccgcaaggccgccgttgcggcagctattgcgcgcgccaaagccaagaaagcggcggtacaggccgagtctcagcctgccgtcgcagagcctgtttcggtcgagcccgcgccagaaaccgtcgccagtgaaatcgttgaggcatcgccggaagacaaacgcaaggccgccgtcgccgccgccattgcgcgcgccagggcgaaaaaagccgtcgcagcggctgatacaccggccaaggaaccggcgccagaagttgttgcatcagaaatatcacaagaagtatcacaaccagaaagcgatccgagaaaagctgccgtggcagccgcgatcgctcgagtaaaggcccgtaaagccgctcaagctcagacgttgtcgagcgaaatgtcgaacgaggaatagatggcctttagaatcgcgagttctccttttacccataatcggcagagcactagctcaataatgctgatggtcgtgctggcctgtattccagggattttggcacaggtctggttctttggttacgggacgctggtgcagattgccctggctatcctgattgccgtattggccgaagggcaatattacagcttcgcaaacagccggttgccaagcgccttggcgataactccgccctgctcaccgccattctgctcggcgtcagcctgccgccgctggcccctggtggatggtggttatcggtacggtgtttgccatcatcatcgccaaacagctgtatggcggtctggggcaaaacccgtttaacccggcgatggtcggttacgttgtgctgctcatctccttcccggttcaaatgaccacctggctgccgccggagagcctgcaggcgcatccggtcggtctggtcgatacgctgttaaccatttttagcggccatgactcgcaaaacatgaccgcctatcagctgcaaatgaacgttgacggtattacgcaggccaccccgctagacggtttcaaaaccggtctgcgcgccggccacaccgctaagcaggtgctcgacgagccgatgttcagcggaattctggccggtctgggctggcagtggataaacctgggcttcctgcttggcggtctgttcctgatgtggcggaaaatcattagctggcacatcccggtcagcatgctggtgatgctgaccttctgcgggacgctcgcctggctgctggcaccgggaagctactcgccgccgatgattggccttttctccggtgccaccatgctcggcgcgttcttcatcgccaccgacccggttaccgcgtcaaccaccccgcgtggtcgtctgatctttggtgccctgattggcctgcttatctggctgatccgcgcctacggcggttatcctgacggcgttgcctttgcggttctgctggcaaatattacggtcccactgattgaccattacacccaaccacgtgtctacggccatcgctgaggaagagttatgttagaaacaatgcgtcgctatggcctgacactggcgttctttggtgtgctgatgaccggcatgaccgcgctggttaacctgctgaccaagccgaccatcgaacatcaggccctgttacagcaaaaaggcctgttcgatcaggttattccgtccagcgtgtacgataacaacatgcagcaagagtgttacaacgtcaccagtgattcactgggtaccgagacacctcaccgcatgtatctggcgcgtaaagacggtcaacccgttgccgccgtggtcgagaccacggcacctgacggctattcgggtgcgattcaactattggttgccgccgattttcatggcaaggtatacggtacccgcgttcttgaacaacatgaaacgccgggactcggtgacaagattgaagtgcgaatttcagactggatcaaaagctttgctaatcagactgttaacggtgctaatgacgtgcgctgggcggttaagaaagacggcggcatgtttgatcaattcaccggtgcgactatcacaccgcgggccgtggtccgctctgtaaaacgtaccgcactctttattgaaactgtgcctgcgcagctttcccacctcaccccttgtggagcacgtgatgagtgaagcaaaaacactaatcgttaacgggttgtggaaaaacaactccgccctcgttcaattacttggtctctgcccgctgttggcagtgacctcgacggcaaccaacgccctgggtctcggtctggcgacgaccatggtgctgacctgcaccaatgccatgatctcggccttccgccgctgggtgccgaacgagatccgtatccctatttacgtcctgatcatcgcctcggtggtcagtaccgtgcagatgctgatcaacgcctatgcttttgggctttatcaggcgctggggatttttatcccgcttatcgtgaccaactgtatcgtggtcggccgtgccgaggcggttgccgccaacagcccagtacaccttgcggcgctcgacggcatgatgaccgggctcggtgcgaccggtgcgatgttcgtgctcggttcgctgcgtgaaattctgggttcaggcattctgtttaacggcgcagacctgctgttggggagctgggccaaagtgctgcgcgtgcaggttattcacctcgataaccccttcctgctggcgatgctgccaccgggcgcgttcatcggtctcggcatgctgctggccggtaaatacttgatagaccaacggatgaaagcccgtgccgcagcgcgcgctgcgcatactttaccgcaagggaacactgagaaagcctgatgaacaaggaaaaacgcatcagtattcttgagcgtttgcgcgataataatccgcatccgactaccgagctggtttacaccacgcctttcgaactgttgattgccgtgttgctctccgcccaggccaccgacgtgagcgtgaacaaggcgaccgcaaagctttatccggtcgccaacaccccgcaggctatcttggaactaggcgttgacggcctgaaagagtacatcaagacgattggcctgtttaattccaaagccgagaacgtcatcaagacctgccgtattctgctcgacaagcacgccggtgaggtacctgaaaaccgtgaagcgctcgaggctctgccgggcgtgggccgtaaaactgccaacgtggtgcttaataccgccttcggttggccgactatcgccgttgatacgcatattttccgcgtctgtaatcgcacgcgttttgcgccgggtgacacggttgaaaaagttgaggagaaactgctgaaggtggtgcctgccgaattcaagctcgactgtcaccattggtttatcctgcacggccgctatacctgcatcgcgcgcaagccacgctgcgggtcctgcctgattgaagacctctgcgaaagcaaagagaaggtttatcccgaataagggcctgtcaataccgccggggttaagctctgtttgaagccgctattataaatataatttaatagcggcgcagagggttacaggaaggatttcgcctgtttgaggaccacgttacaggccttggttttgaccttgtctttcagttgagtgaatccccgccgccgaggttattcagatccagattttgaccgttaccggtatgcaaaataccgcttagcccatcctgataatcgaccttttgtgtcgccgtactgttctcaatccccaacttattcatcaatttgtctttaaccgatgtggcattggttgccgagagcacgttattttgcacacagtattgcaggataccggccgcgttggtgctgcttttcgaggtcaggttatttccgctgccgttcaataaagaggtcagctggctcatcgaggtgccgttcgcgggcgtgctgttgccgcttccgctcagttgctgattcgctgcatccgacagagacccgagaaggctattggcctgtgcgcctccggcaatcagaagtccgctggctgccagggccaaaatactgctacgaaatgctttcatcatttgctccatccattttgcgattacagattcgttttatgttgatcaacataagcttgtcgcgaatgacgacgcatcgcaataggaatacgtcggataatggcccagggcagaaaagttaaatttatctgctgacgttcgcgttaccttgttgagccagccagcggcttgcggcaccaaaaagtgctgggccaacggcgttgcccttcccgcctcggcaaccaccagcgcggcgtggcgactcattggcgcgatatccagcgagcagcgcttgagtgctggcgtcatctcatcaatcaagtgacctcttggcaccagcgcacacccagtccgacaaagactccctgcataagctggaagatagaactgctttccagaatcggatgcagctccagtccgttggtgcggaaatagttatccagatagcggcggaaatagcggcttggctctgacagacacagcggcagctccgcaacctgctgcacgctcagctgggtgagcgggctaagctgcgggaagtgatcgggatgataaaccaggtctacaccgccgtcgtgcagaggaaacagctggaaacgcagttcgttgagggtcgaaaactcgaagaaaccgatgccaatatccaccgaatggctgctgagtgcctcgatcagttgatcggcgctgacctcggagacgcgatactcaagtccggaatgctcctggcctattcccttcagcagcgccgctagcgacaggctgcactgcggcatcacgccgatgcgcagcgtaccgctcaggccctgcttcaacgaggcgacctcaagcttgaggccttcatagaccgagacaatctcacgtgcccagctcagcacccgcaagccttctgcggtaaagccctcgaagttgttgccacggttaattaaattgagatcgagctctttctcgagattcttcagccgcatcgacagggtcggctgactgacaaaactcgcctcggcggcacggccgaaatgtttttcgcgctcaagattacacaaatagataagttgcttaatgtccaaaggctttattttcagtaagttaattgggaggcgctgcggtcattaagaatttatatacttgtagaagtactgattcgaaaaaaccgaccacaggaatcttttatgttcttcgcactatagagttaatcatagcggggcggttaacagggtcactccccctaacgaccgatttacactgtttcgatgccagaaacagtttttatggctcaatgcgcattttatcgacctttataactcactttgtgatgtgggtaggcaaacttttatctctctttgttcttaacggtctagaattgaattacccacccactcaagagaaacaatgagtggacgttgatagctgacaaaaggaaattcagatgaaaaaggttattgttatttcaatcgccgctttactatctgccgttgctctgactggatgcacacgcacgagctatgcaatccataccaatgacgcccgcactattatcagtgacggtaaacctgttgaagccagtaccgggttgatcggatataccgatgcctggggcaccaaacagcagataaataaggccgacgtgaaagaaatctccgcgctgcctaattaattgcgcaatctcaatggcaccgtggaaatagcccagggtgccttttttattgacgctcgctgagtgatggccaaagcgcagagttataaacctcgtcattaccgccattgccacaattccggtcgatatccgtcctggtcgctgacgccttttcctgccacaaactgcaccattaagagatgacgcaattttacgcgcttcttgcgctgctattcgcagcggacaaatgttcaataacaaccctgattctataatctgtcaaaatttaaccaatgggcctgaaatcaggacattttgagttgataagtatgttctcaatctttacttaatctaacaatcgcgtaaagtttgattattctttctaaaaagtgcttgatatgactccaaacttaaggcgttttgtttgcagcacaacggtattattttttgcgtcgctcccggctgtgtacgccagcgatgcgcttgataatgcgattgtcgttccgcagggagagcaacgggctgctacgtcctcgcctaccatagccgatatctatcgccagtgtaaaaatggcgcaacctacgatggaaccaaggctcaagaggggcagcgtctcatctgcaacggttttatgatggcggcagttcaatcggcgacgaacaacggaaacggcacgtgccctgccgtcacctatcgacagattttggataaggtgaatcacaaaattagcggcgtagaacagtggcagcagcctgcattaccttggctggtcgcggcattaaaggacgtcggttgtaaagaccactgatgtaaagcgaggatggcgtaacaacctgcccgtgaggacagattgttacgcggtgagtcaatcactgactcggcgtgaaactagattttcagtttgatgtaatcgatagcgcggctaacaatgccacccttcggcaagtcttcgagcgcaaccagtggcacagttttaatcactttaccgttatccacaatattgatggttcccacgtcctgacctttggtcagcggtgcatcaatctgctgattgttcaagacgtactgcgccttcactttttcactgtctgcctgcggaatgttcaggtatacgtcgtcaaggctacccaccttaatctgcggtttatcaccgaaccacaccttctcggtcgaaacgctctggcccgctttgaatacctgcatgctggtaaattcacggaagccccaggtcagcagcttacgcgcctgctcttcacgaccctttgagcttttgcctcccattaccaccgcaatcagacggcgattgccttctgtcgcagacgcgataatgttgaagcccgccgtttcggtgtgaccggtcttcagaccatcaacgttgagatttttatcccacagcaggccgttacggttgttctgagtaatgttgtcataggtaagcgtcttctcgtcatacatatgatattcctcaggctcaccgccgataatcgcgcgcgaaagcttagcaaggtcgtatgacgtggtgtactgacctggcgcatccagaccgtgtacggtctcgaagtgtgagttagtcaggccgagtttttgtacgtactggttcatcatgccaacgaatgcgtcctggctaccggcaacatagtcagccatggccacgcaggcgtcgttaccagaatcgatgataatgccctgaattaggttacgcacggtcacgcggtcgccaggtttgaggaacatcagtgaagaaccggccagcactttgttgcctgcgacccaggcttcctgaggcacagtcaccacgtcatccatggtgattttatgctgatccagcgcacggtcgatgacatatcctgtcatcaattttgtcaggctggcagggttgcggcgctcgtcaggatttccggaagccagtacatcgccggtagcgtaatccataagaacataagaagcagcatcaatgctgggtggcactacctgaaaatcgatcggtgctacggcccacgcattgctagcagaaacacagattacaccggacaaaatactcaatactaaacgcttcacttaatcatcctcaaacgcacttttgaagtcagccgaaacccagtcattgggaaagccgcacaaggttaaaacaacccattggcggcatagggtgcatcaattcacgcagaagctaaacaacaagacttttgctgaaagtttcacaatgaaaccatttgcttacaatttccaaattttgggccgtcatcaatgcgctctatcccacaattacaacattcaattagacgtaaagcattatccctaataaagttgtgacataaaattaacattccagataaatctcttttaacagattaacccacacacacctgcgaagacctaaaatgaaattcaaatccgagataaaaccttataccggcgcggcgggcggttggggttcattggaagctaccacccgttacgttttcgacagtaaaaaagtgctttccaacctgcgtaacctgatgcgtgttaataaaggtcgtggattcgactgcccaggctgtgcctggggcgacgataaccacagcaccttcagcttctgcgaaaacggcgccaaggcggtaagctgggaagccacccgtaaagcggtagagcctgagtttttcgcacagcacagcgtggcaaaactgcgtgagcaaagcgactatttccttgaatatcaaggtcgcctcacccacccgatgcgctacaaccgcaccaccgaccgctatgagcctatttcgtgggatgccgccttctccctgattgccagccaccttaaggggctcgaggatcctaatcaggctgatttctacacctccggtcgcgccagcaacgaagcttcttacctgtatcaggtatttggtcgtatgttcggcaccaacaacttccctgactgctccaatatgtgtcacgaagcaagcggtgtcggcctcaagcagagcatcggcgtcggtaaaggcacgattcgtctggacgatttcgagaaggcggatgcgattttcgttttcggccagaacccgggcaccaaccatccacgtatgctgcacagcctgcgtcacgccgccgatcgcggtgccaaggtcgtgagttttaacactctgcgcgagcgcgggctggaacgttttgccgatccgcagaaaccgctcgaagtcgtgacccccaaagcgggccgcatcagctctgcctattaccagccgaatctcggcggtgacatggccgcgattcgcggtatggtcaaggtattgctacaagaacaccgccagcgtattgcctccggcgaagcttcattatttgacgaagacttcatcgagaaaaactgccacggcgtggatgaatacctggatatcgttgatcagactacctgggagcaaattacccaccagtctggcctgacagagttcgagatccgcgaagccgccaacatctatatgaaggctgaacgggtgatttgtacctgggcgatgggtgttacacagcacaaacactccgtgccgacggtgcgcgaaatcaccaacctacagttgctgttcggccagctgggcaaaccgggcgctggcctgtgtccggttcgtggtcacagtaacgtgcagggtaaccgcaccatgggcattgacgagaaagcgccaaaaccgctgctcgacagccttcagcgtcatttcaaatttaccccaccgcgtgagcctggccacaacaccgttgaggcactcgaggcgatgctgcgcggcgaagtcaaagtgcttatcgcgctgggtggcaatctggccgctgcggcgccggatacgccacgcaccgagcaggcgctgagcaactgtgatttaacggttcagataagcacaaagctgaaccgaagccacctgacacctggccgcgaagcactgattctccccactctggggcgcacagagctggacatgcaggccaccggttcacagtttatcaccgttgaggactcgttcagcatggtccacgcttctgaaggcgtcggcgtgccgttgtcgagcgaacagcgctctgaaaccgcgattgtctgtggtatcgccgacgcggtgctcggtaaacgttatctggactggatggcgctcgcggatgattacaacctgatccgtgaccacatcgaagcgactatcccaggctttaaggacttcaacaaacgctgcgacatcaagggggattctacctgggtaacgctgccgcagaattgaccttcaataccccaaccgggaaggccaacttcagcgccgcaccgctgccggagcgcgtgatcccgatggaaaatgacgacgcgccgtttacgttgcaaacgctgcgttcgcacgaccagtacaacaccactatttacggcctcgatgaccgttatcgcggcgtttatggtcagcgcgaagtgttgttcatccacccgcaggacctggctgacttaggcctgaaagacggtgagctggttgaaattgaaacgctttggaatgacggcattgagagaaaggtaagcggtttcaagctggtcagctacgacatcccacgcgggaatctggcggcctattaccctgaaaccaatccgctggtgccgctgtcgagcttcggcgatcagactcataccccaacctctaaatcgattcctgtggctatccgtcgctgtgaggcggtggccgatacgcgtcgtattgcctgattgactgtttggcagggtgcatttcttgcgccctgccttcccattaatggctacggccaggcgataagatttccaaaacgcacatcgcgatacacgtccaactcattgcgcgcctctgcgggccagtcgaccggataaccgatgatcgcgttgtcggttttatcgtccagcgctgccagcagcgttttacgctggctgccgtaggcatcaatcatcaacacctcggccgcttgggtgagggtctcctcgacgccataacgctgcgcaatgcggcgaataaattcatccgtctgcgccagatacaccgcgtcacgccggtaaatagcgtaatacagttcaatgttttgccgttcttcccctgtaatgccgcgtttgcccgacaataatcggcaatctctctgcgcagcatcttattaccgcgcagcagcggctgacttttcaggtagacgtgcagccgaccggccaataccgccatcagggacacgcgctcgacctgtccgttactggaaaactcgaaggttaaggcttcccaatcctttcgcgccaaaccgtaacgcagcagccgactggtgaaaaaaagcgccgccggtaaggtgtagtaaggcgtgaccgccgacttgactatcccgatacctaagccagactgacgattttgcgcgatgcaggatgctcgctccccagtcgctgttcgggcgtggcgtgcaggtattgatgtagcatcagtgccacatccgcggaatattctccggcaacagcgtaatgaaaggcctggctttctccgtcggtatgactctctcacagagttcggtaaatttgccgctccatacgcgaaaaggctgaaaatctatctgcgtaatctcaaggtccgccagctcaaccttttttctggtaaacagatattcccgtaactgtgcatagtcggcattaagatactgttgctcacccagccgtaaatattgcagagcatgaacgcgattatattcccgcacatagtctgccactctggcatggcgatattcctcaagcgcctgctgcaactgtcggtttattaatgccggataacggataactgccggggtatttttgtacttcaccagcgcgtcggcgagtcggatatattcctgcctcttgccggggccctttaaacaggagacgcaactcaccgggacgtcatcaaggacataatcgagcccgtacctataggttagtaaagcgagaaagttttccggctcaagggaaagcgttttgaaataaagcctggagggcaggctcaggctattatcggtcgactgcgtcagcgacattgcccgcattggctccctcggtaaaggtagcccgaggagtaaaatgtccataacactttgattaaattcatatgccagcgccgaaaccgaggcatagcgccgggtgttaattctctcctcgacgggcaacggcaccacccttggcgaatgacctcgcgggtctcctcctcactgagcgggatgctgcgctcgataagccgaggctggtcgtgacgcccctctccgctactgatattcatcgccaactgcatcttgattttatcgatgaatttcaattggaaatcgacgacgttagtgtcctgatagccccgtgtttatcttcgttataccacgccagaatagaggctttaatgacttccagcgtcgccaccatcaacagcgaatacgcgaaggctttagcaccgacttttcgggttatcatacctggaatattggccagaaaaatgttggaaagctcttcgacaatagccaaggttgcctgtattgattgccgctgatgttctcttcttctatccaccacaatatccagaaatcgcctaatgtcatcttcaaaggcaagaggctcgccgtcgtcagaatatataagttgagagttcaggctgactctgccgctaaaagaggaaaaggtgctcgcaaggtcacccatgctggctgagatttccaatgaattaatcggcagagtgaaagagtctgaagtgtgtaagacgataggtcgcgcgctgccgaaataatagaccggttgctcggccgtagcataggtggaaaatgactcgatgctcgaaccgtgcagccgggcaatagtatgcatcgccgcagaggtgtctttggcggtgaatatttcggtgggtacttcgctagagagagttattccacgtgccggagacataaataacgtccgtgaagaagacagcgtgtcggtggcttcggaaaacagatcctgtggccgaaatgagaagagacttttaacggttttcgtgagctcgacgcccttctttgccaccagggagagcgtgggcgcctcaaagctacacacgatatttttttcaacgttatcataagacgggagcggaacccgtcgtaacatcccacagcgggataaacgacgccagagagatatctctcgcccagtcctccatacgggtcaaaaaggtgctgccaatcagcttgttcttgcgggcgctgctaaaggcaatgcggtcgacaaaacaggtcgctgcctcagagaaatcatcatcgacaataaagctacccagctcgctgaacgaaagatcgagaccaccgtcaatctgctcaaactcatatcccgtcttctcgagaaaggcgcttttaatatcccttccttgaagaactttttattattcagcatatcggcgcgggcctcgctttcatttggccccaggaaagagcacgaaccggagtcatcgataaaaaacaggtatttactggtattgaactcaaaggaaactacgccccctgaaaaagattattattgctcaggctgcgagcagcccctttatccagcagttgagaatgataatttgaataccgacttttacctgtccttttcgtgactgattaaaccagttatcgataataaacctcagcgttaattcaaccgacgaaatcagtgagtcacgaataatgtttatccggtcattcttggcaagcgtattgtcgtctttataaaaggcataaatttgttcgaccaccacgtgactgctcagcttcagcgcctgggttcgctgcttgtctatcaggtgaaatgtagacagtagctcgataacccgctcgaggttgttttcactgagtcgctcatgcagcaagtcctgcgccatcagctggacaacaaaactcagcggagggtgggtcagcatagacctgaactttttcctgtcggcgggtgtaacggaaacgtcggtaatgagataaataaattcattacatcgctccagcggcttcccccttttttcctgcggaaaatattgctcaatcagcagacccaacatcaacttccagccgcgcatttcatgagtgtgataggccttgttttttaacaagtgaaaggggaaggccaggattgctattatatcagcaagacgtttatcgatataatcactgccggattttatttttataaaacgttttagttcaaaacttagcgcggcatcaatataaccaaagcgtttaagtaaataatagagttcaccaccgccctgttcatcgaaaatattttctattttcaaaagatggaaaatataatttatataaccgtttaccgccacgtgcgcgattgattgcgcatatccagattggcgcaggcataaaagcgttgcaccggcacgggcattatttgctctttatcgctgcacaaccaggcaacggtaacatcgtcgagcatcgctttgaccaaatcgatgagggtgaaatcggtcgaatcggcgataaaagcggcttatatcgccgggtaatatcgtcgtaaacatactcattagggaaaatacgctcgatattgggcgtattattctttgcccgatcgctcgggtcaggaggtaaaggcacgctatttattgccctcggagccctgttgccggtgtgccagcggcgaggaacataatcagcctgcggctgagcgtataccctgactatgatgctcatccggcgttcaatgcgctggataccacgagtcagggtggccattatcgaatcaacggtcaaagactgcgcgacaaacgcggaacgggctggtgaaacgccggtcgccaccggcgcagagaggtccaaaaaccacgctcccgccgtgtccagggtcacgcccagccttccggtggtcattgccagcgcaatctgtcgttgctgaggccatacgcgagcataacccgccactcctgccgtcacaaaacccaccgccgaaccgttcttggacggcgcattgacgcagtagcctcccggcgttgcccgataatgtccgcaaaaaaaggcgctagactgtggggcaatctcatagcgccctatcgccgacggcggcccgtagcaaggagccattccgggtaggcgatatcccggcagggtttcggcatcaggcgtcagaggcgcggcctgttgctgcgcgtggtgggtatccttttgccacccggtccggtcagctgtatcaggaaacgccagccgcaaagggttgcaggtcataatatggtagagcgcagtccccaaaccgttgatcagcgcattggcctgtttaagcatcggaatcagggcgaaaacggccatttccggcgtgatatagcggccggtaaggcgtgatgaaaggaacagcagcagcggcctttcacattgcgcggcgatttcgttcgctgttacccctcttaatgcaccggcctgcgcaagcgccctgctaagttgccttaaaacttgcctgttgaactcaactgggatacctgccgcagaaagccctgcaaatgacagaaagtaggccatctgtttcgaaaactcgctgtcctctatttctggaggcgggaaaggtgcgggttgataaagcgcattcagcaattgcaaattttcagctgtccgcagcgcgtgatccgctttgacgacgtcaataaaaggtgcaaaacaaggaccctgaagcaaaggttgagaagcgcggctcagcaacgtttcaaccatcgcgttcagcctgccgctcagcggctcaacccgagactgatagccgacaataaaagattgggaaagcagcgccaccggcgcgtttctgatacggtcaataaactgtgtgaagccgttgtaggttttcaacaaactcaaaacgggagtagtcggttgacccacggcctgaatcgcgtccttctgagcatcaactggcatcgccccccctttaatgagaatgaaggttccggccattgtggggtgatttttaaacgaatgaagtattcgctgctataacattccgctcaacgtttaattatcagccagcaaaatagccacagacggcttttcatctgctttaataacgtcaaaataggcagatgccgcttgcccacgatggccgattcgcgtaaaactgtctgccgctaatcgaaccactctaacctcattctctggacgatatgtttcaagataacccgctgctcgcacagctaaaacagcaacttcactctcagactccgcgcgttgaaggcatcgtaaaaggaactgagaaaggctttggctttcttgaagtagacggtcaaaagagctatttcatcccacctccatacatgaaaaagtcatgcatggcgaccgggttattgcttccgttcaaacagaaaaagagcgtgaaatcgttcaacctgaaacgctggtagaacctttcctcagccgttttgtgggccgcgtgatcaaaaaagacgatcgtctttcgatcatgccggaccatccgctgctgcgcgacgccattccatgccgcaccggccgtaacttcaatcatgaagttaacgaaggtgactggtgcgtggcagaaatgcgccgtcacccgctgaaagaaggcgatcgtggcttccaggccgaactgaccgagtggataaccaccggtgaagacgacctggccccgtggtgggttaccctggcacgtcataacctcgagcgcgaagcgccagaatttgatgtgactgaactgttggaacagggcctgacgcgtgaagactgaccgccctgccgtttgttaccatcgacagcgccagcaccaaggacatggacgatgccctctacgttaaagataacggcgacggcacactacaactgaatatcgccattgcggacccaacagcctacgtgaccgagggcagcgacgccgacaatctggctcgcaaacgcgcgttcaccaactacctgccgggcttcaacattccaatgttgccgcgtgaactgtccgacaacctgtgctcactgctgccaaatgaacgtcgcccggtgctggcgtgtagcgtgaccttgtctgccgacggcgcgctgggtgacgatattcgcttctacgctgcgtggatcgaatcaaacgccaaactggtttatgacgaagtttccgactggctcgaagacgttggcgaatggcagccacagaatgagaccatcgcccagcagattcgtctgttaaagcgcgtgtgtgacgttcgctccgcatggcgtaccgccaacgcgctggtgtttaaagaccgtccagacttccgcttcgtgctgggtgagaaaggcaacgtgctggaaatcatcgccgagcaccgccgcatcgctaaccgcatcgttgaagagtgcatgattgctgccaacgtctgtgccgctattgcgctacgcgacaacctcggtttcggcgtttataacgtgcacaacggtttcgacccgctgctggttgagaacgcggttgccgtgctacaggccaacgacgttgaggcagacggcccaacgctgctgacgctgcctggcttctgcgacctgcgccgcaagcttgatgcgatgccaacgcagttcctcgacagccgcattcgtcgtttccagacctttgctgaaatcagcaccgtgcctggtccgcacttcggcctgggccttgaggcttacgccacctggacatcgccaatccgtaaatacggcgatatggttaaccaccgcctgctgaaagcgatgattacccagcagaccgccgagaagccacaggacgaaatgaccgttcaactggccgaacgccgccgtctgggtcgtatggccgagcgcgacgtgggtgactggctgtacgcccgttacctggaagacaaagtcggaaccgacacaaaatttagcgccgagattatcgacgtcacccggggtggcctgcgcgttcgccttcaggacatcggcgccgttgccttcattcctgcgccattcctgcacgccgttcgcgacgagctggtgtgcagccaggataccggcaccgtgcttatcaaaggtgaagttgcctatcgtcagagcgacattatcgatgtcaacatcgctgaagttcgtatggaaaaccgcaacgtgatcgctaaacctgccgcctaacggcttgctgcatcacgcaaaaacctgtcggtatttatcggcaggttttttttcgcctaatcgttgacgatcaatgcgcaaggattggcatgcggcgctcggccggagtaaagtgtcagccagcaattcaaacaaatgattatcattatcaattattatttgtcatgacttaggaatgcctgcaacgatgagtttacctgtgaaaccccctatcaacgtctctaccacctgctgcatcgtcggcggcggccccgctggcctgatgcttggctacctgctggccctcaaggggtcgacgtcacggtgctggagaaacatgctgactttttgcgagattttcgcggcgacaccatccacccttcgacgctggaaatcatctggcaactgggctttcttgacgagtttctcaggctgccccatcaacgcgccgagaagctgtacggtgaaatcgccggaaaagaagcgacgattgccgacttcactcgtctgccgacccaatgcaaatttatcgcctttatgccgcagtgggacttcctgaattttatcgccgataaggcgcgccggttgcctaactttaggctgctgcagcaggcaagcgttgacgaccttctccagcaagatggcaaggtggtgggcgtaaaggtcaccacgttggagggcgcgcaggaaattcgcgcactgcttgtggtgggctgtgacggtcgtcgctcagtggtgcgtgaaaaagccggacttgaggtaatgaactttggcgcaccgcgcgacgtgctgtggctgaaggttaaaaaacgtgacaacgatcctcagtggaccaccggccatcgcggcccacgcaagggctttatcatgatcgatcgcggtgactactggcagtgtggatactccatcaacaaaggcagtctggaggacatgaaacaacaagggcttgccgctctggtaacctctattgctgagatttcaccgtttgacgaggctcgcctgctgactgacattaccgactgggaacaggtcaaactgttggagattcgtatcgatcgcctgaagaaatggtcaaagcccggcctgttgtgcatcggggacgcggcacatgccatgtctccgattggcggcgtcggcgtgaatctggctattcaggatgcagtcgctaccgccaatattatcgcgccagcgctgcttaaaggccgcttgacgctccgggatttacagcgagtacagcgccgccgcaccttcccaacctgggccacccagtcgctgcaaatcatgataagtaaagcaggacaaaaaccgcgtcgcaaagcgccttctggtatggagctgtggctgcggcaacgtgcatttatcccgttcctgtttggccgtctgattggaattggcttctttaaggaaaatttcaaaaggtagtcttaaggtatagcgtggtaaaatcgctcgcaaattattgataacgagcctgatatgtcttcatctgagattttactgcgtttgcaggatgtgagctttagtctgaataaccaggtgcttttgcgccccacgtcattagaactcttacccggcgagttcacgttgctaaccggaccgtcgggcagcggcaaaagtacgctgcttaaaattgtggcctcgctgcaaaatccgacccgcggcacagtttatttcgaaggcaaggatatccgcaccctcaagccagagtcctaccgtcagcaggtttcctactgtttccagacgccggtgctgttcggccaaacagtgctcgacaacctctcgttgccttaccagatacgcggcaagaaagtcgacaagtcggcgatggccgactggctcgagcgcgttaatctgtctcgctccctgctggagaaaaatgtgcaagagctctcaggcggtgaaaaacagcgtgtctcgctgctgcgaaatctgcaatttctgcccaaggtgcttctgctcgacgaaatcaccagcgcgctggatgaagaaaataagcagaacgttaatgcaattattgccgaacaggttaaacaacagcgcctgtcggtgatttgggtcacccacgatagcaacgagattcgccacgctcagcgggtcattaccttaacgcgtgaagccgcaggagagagcagccatgaatcagcataacatcaccaatgagtcactgggactggcgctggttctggtggttgtcgcgctgctgataagcaagaaagagaagctcgggctggagaaggacattatctggagcgtggcgcgcgccgtcgtgcagttgattatcgtcggctacgtgctcaaatacatttttgaagtcaataacggctggctgaccgtattgatggtgctgtttatctgcgtcaacgccgcgctcaacgccaagaagcgcagccgcaatatcgataacggctttatcatttcgtttattgctataaccgtcggcacctcactcacgctgtccgtgcttatcctcacgggctcgattgagttcctgccgatgcaggttatccccatctcaggcatgatagccggcaacgccatggtcgccgtcggtctgtgctacagcaaccttaaccagcgtttcgccgacaaccagcaaaaatcctcgagatgctgagcctcggagccaccagcaagatggcctcagggacaatcatccgcgacagcattcgttcagcgatgattcccaccgtagatgctgcaaaaaccgtgggattggtgagcctgccgggcatgatgtcgggacttatctttgccggtatcgaccctgtaaaagccatcaagtatcaaataatggtgacctttatgctcctcgccaccgcaagcctctcaacgattatcgccgggtatttggcctataagcgtttttataacgaccgagttcaactaaaagtccaaaagtaggggctttttattgcaaaattttcggggtaaagcctttgataccgaggcattttttgagcggcggctctgatccgcttttagaccaagggcacgtgctttgcacgctgggcgcgtgcctttgacccaaaagacttgaccttaaaaaaatctgcaattaaaaacccaaattttatttacggccccatcgccgggcggtggcagaggtacgccatggggtcatcaggtattccagcaaaatgaccagcagaaaacttaccaccccaagcagcgccaggaacgcgattgccgagaaagtacccgcggtatttaatcgagaattagcctgcaaaagataggcccccaacccaccgctggtcgaagccgtccactcgccgataacagcaccagtgacgctgaaggtcgccgaaagcttgagcgccgagaacagcggcgtataggtcgccggaagcttcacgtagcggaaaatactccagcgtgaaccgcccatcgacttcaccagattcaacatgtctttatcaaccgaattaagtccatcgagcacgttgaccaccaccgggaaaaataccaccagcgccacaataaccagcttgggtgccagaccgaatccgagccagatagtcaacgccgcagcgatagcaatcaccggcaccgcctgactggcaatcagaatggggtacagaatgctgcggatccacggcgtggcgtccatcaggacggcgaagataaaacccgcccccgcgcccagcacaaaccccatcacaaaggtgacgaaggtaatgcgaaatccttgcagcaacaccggcatgtcagaaagcatgtgctgccaggtctgctctggcgatggcagcacatacggcggaatatgataaatccgcaccgccaaatcccacaccagcagcaccaaaagcagcgcagcaagcgggccacccagcggcaacagcagtttcttcaacagcagcggcttgcgttccgaggtcaggctacgggcatcagtcatgagtcagggttcctgtaggtcttggtcggcgtggctttccgtaaacaccaaatcgaggatttttcgtttcagcacggtaaactccgggctggtcaggcaggaaagtggccttggccgcggaatgtccaccgtcaagatttctcgaacacgtcccggcctcggcgacatcaccaccacgcgatcggccagatagaccgcttcgtcgatatcgtgggtcacaaaaatcaccgtacgttgttgttcagaccataccgtcaacagccactgctgcatagaaagacgggtctgtgagtccagagcgccgaagggctcatcgagcagcatgatttcgtgttgcatcgctagcgtacgcatcagcgccacacgctgacgcatgccgcccgacagcgccgctggatagtgatggataaactcacccaacccatagcgttgggccagcgccacacctgccgcgcgctgtgccttagtggctccgcccttaagaatggccccgagcacgatgttatcaatcaccgtcatccacggcagcagcaggtctttttgcagcatatagccgacgtgaccgcttgttccagtgacgttctgattatcaatgagaattttgccagagtcaggcgtcagaacgcccgaaacgaggttaaacaaggtgctcttaccacagcctgaaggcccgacgatgcagacaaactcgccctgctgaatatcaagattagtcggcgccagggcagtcatactgccaaaacgacgtgtcacctgttgcagcgacagtttggggtatgtcatctctcaccttttcctcatacgtcagtgtgcaggttaaatcactacaaaatttcgcatttttcgcgaccaaaccacactaaatcttccactttcaccgccacttcaccgcgctgtgcaaaaggttcgatcgcccatgcgccccacatcggcgtcgcattaccggcatcgataaaaccgtgcgtataggccgccccagcggtcagagaatggccgatattacccagcaggtcgagcaggataaatccctcctgagtgagccgctggtgtgaaagaccgaacagttcgttggcaggcatccccggacggcaaagcgccaacgtctcataatgaagacgctccagatcacgtaacgcttgggtggcctcgggataatcgccgacaatggcacagcgtgtgcagtcgccccaaaagccctcggcagttatcgggtgcacgtcgaccatcagcacatcctgctcggcggcggcccgctcccccggcccttgcgttggaaagcacacgcgggtgttttcccccaacccaacgttggtgatggtccagatgccctgtacgccctgctcgtagagagaggtatgaaccacctgctcgacgtcaatttctcgaattccggcacgcgctgcggcaacgcccgtcagcgcagcctgttttgccatcctctgcgccgcccgcagtcccgcgggggcatcaaaagcaatgtccggcccgggacgataggtccaggccggtttgagggtagaaggtgagctcatcatggctccttacggcaggtactgattggtgaaatattggtcggcaggaagaggatccttgacgatgtcttcggctttaatggcggtcagcagactctgccaggttgcggcttcctgtgccaaggatttgctgtcggcaggcttcagcagcggcacggtatcggcccattgctgcttgatataaaccgggtcgtaggctttgctgtaggcggtcgcaaacgcctgcacgccctcgtcaggatggttaacggcgtaggccatacttttcaccgttgcacgcataaaggccttggccagctcaggattggccttcagccagtcctgattacccgccagcatgaaaataggcgtattaggcacgccgtgggcgatagcgggcaaaaattctggtttctgtttacccgtggtggtcatctcggtgccttcggcgttagtaatgccggtaatgacatcaacgcgtttttgcagcagcagcggtacggtatcgtctgcggcggtcaccatctgtacgtcattcagcgtcagaccggcgctttttagcatcagcgccaactgggctttggtccaggcgtcgttataaatgccgacgcttttccccttcaggtccgccacggtataagttttgccctgctggctaataatgccccagttattgccgttgccgtaacgaccaatagcctcgaccggcgccccctgctctttggcaaagatgatgtccatgactgtggtaaacgcgacgtttgcccgcccggtccccagaaacttcatggtgtcagccacggtgggcggtgccacgatatccaggtcgatcccttcctgcgcgtaaaaacctttttccttgcccaggatccacgggatccagaaaccgtcggccaccggccattcctgaataaaggtcactttggtcagcgaggccgccgaggccgtggctatccccctaccgccggcaacagagtactcatcagcgttgcccccgctaaaatggtcccagctaaaaatgtacgtcttttcatgttcatttctccggcagttttagaggaatatttagtcaagcctcctgcatattgggggggacattattttatgtcaatcaatttgttgagtatttttgagcttgaaaagtaccgcgaacggtgacatttataatccgcgtacaggttaaaaattaacctgcctaatcaggagcggctaagatgcccattaaatcaccggaagccccgttaaacgtggcctgtctacagatggaacctgtgttcggcgacaccgagcgcaatattgccacctcaatttcaatgattgagcaggccgcggctcagggcgctcgcctgatggttttgccagagttgtgcaataccggctacgttttcgcgtctcgcgccgaagcattcgcactggcagaaacgattcctggcggcccgtccactcgagcgtggtgcaattgcgcggcgcagcttaacgtctacctggtcgccgggatcaccgagagagagggagaaagtctttataattccgcagtggttatcggcccggaaggtttcattggccgttaccgtaaggtgcatctttggggagatgaagccctgtattttgagccgggtaatctcgggtttccggtattcaagacgcgcatcggcacactcggttgccagatttgctacgactgttggttccctgaaagcttcagaatggccgcgttacaggggcagaaatcgtctgcgttccgaccaactgggtgcccatccccggtcaggatcctcaccgcgaggcgatggccaatattttggtcatggccgcctctcacagcaattccctgtatattgccgccgccgatcgggtcggcaccgagcgcggtcagccttttatcggccagagcctgataaccagctacaccggttggccggtcgccggccccgccagtgtcacccagccagagattgtcatcgccacggtgaatctggcggacgccaaacgccaccgcaactggaatgattttaaccaagtattgaaggatcgccgtccggaaacctatgagccaacgggcgttgtcaaatgattaagccttaaaaagcttaccactctgatatcaggggcggatatcgccgcccacgaacttaaaaaaatttcatcgtattaaaacgtgttaccgggtgatgacctgctagatttgcggcacatcaatgtcccacaggcatcctgcgtgctgtgtttctatcagccacggggatgggcctttaacaacccgcgcgcgccctcgtcaccgcacaatgcctcaaggggtgcctcatcgtcagcgggaaacccacaggatgccctacctgcccgcggtaaactggccgcgcgcattgcccctgctgcacggactgcgcgaccgcaacgaaaatctcaggcttgatgaagggcatatctgctagcgcaataatccagcccgaccagtcagctctcgccctaacgcctgcggcaatcgagtcacccataccctcgctctccaggcatagataaggcactgccgctcgctgacaaaaatcctgtagcatcacgtcttcagggcgcaatacaacctgtatatccagctcgctgcgctggatgttctccaggctttgttcaaagacagttagcgaggagttttttagcgtttccagcagcttgtgtcgccccgttgccgcacgaaagcgctgactctttcctgccgccagcaggacaactcccggcttggtcatcgcgttattctcccgataaaaaatgagtctgcattattcgcagactcattccaagcaccatcatttatcacccaggcttattgcttgcgttggtctgccacctgtttcgacgtcaccgtcccggttttatcaccaaactgatggagcacatagttggcgactgcggcaacttcatcgtcagaatatttagcgccaaaatcaggcatcatcacctgctgctgcccgacgctgattttggtgccgtgcagaatggcctgtatgacgctgcggccctgcgggtcgttcaccgccgtgctgcctttcagagaggcataaggcgtttggcgcccctctccattccactgatgacagccgctacagtctccggcaaacagctgacgccccagggagttgtcctgatcggcgggaggatggcactggagttcatcgcacctttcggccgcagattgacggcactgcccacgtcggttttgactggctcaatgttacgcagatagttgaccagcgcctggttatcttccggcgtcagatactgggtgctgttttcgataacctcggccatcggacccgacgcgctgctgcgacccgctgcgtggccctgagagagaaactcggacagctgctgctcgctccagtcgccgatcccggtctgtttatccgggtaatgtttccggcaaaccagccctgaaccgccatacctcccagatactgactctggttcagaccaaaggccacgttgcgcggggtatgacattcactgcagtggcccaatgccgtcgccagatacgccctcgattccactgagcgtcatgatgcgggtcagcaacaaagcggctttgatggaagaaagccagattccagaacttcatgccccagcgctgattaaaggggaaagacagttcattctggcgattcggctgtttcacccccggcagactgaaaagataggctttgatggccagcacgtcctcgcggctcatgccggtataggaggtatagggcatcgccggatagagattaccttctggccccacgccttcacgcacggcgcgaacgaactgttcgtcgctccagttgccaataccggtctctttatcggcggtaatgttagtgccatagattgagccaaacggcagcttgaatctgaagccccggcgaaaggtttaccgccggggcggtgtggcacacgacgcagtcggcggctcgaaccagatatttcccgcgttcaatcgggctggtgatgctcgcaggtgcaccagaaagcggagccgtcggttcagctccgaccggtcgtaacaacagataaaccacgtaaattaatgcaatcaccaccccagctgcgataagccacaggatacctcgaagcccttttttcatcctttagcctcctgcgagagggcattggccgcctggtggatagcggcacggatgcggacataggtcgaacagcggcacacattgccgctcatcgccgcgtcaatgtcggcgtctgtcggattctgtttttgtgccagcaatgcgctcgcagacataatctgtcccgactgacagtatccacactgtacgacgtcgagattgacccaggccagttgcaccgcctttccggtcggcgtttcaccgacggactcgatagtcgttatcttcttgcctgccgcgctcgccacggtggcctgacaggagcgcaccggcacgccgtcgagatgtaccgtacacgcgccgcacatcgcaatgccacagccaaatttagtgccggtcagcccggcttcgtcacgtaaaaaccacagcaaaggcatctgctcgtcgccgttgaactcgatggatttattattaatgatcaaagtagtcatggtttcctcagacttaaacggtttcagacgtgccgggacgatggaatggcaggctgagtgagctacgtggccgccccaacagagccagggcattacccacagccggagcaatcgtcggcagccccagttcgccaacgccgctcggcggctctgaggaagggacgatgataacttccacttccggcatctcgttgatgcgcaaagggcgataattgttgaagtttgattgttcaatgatcccgtctttcatcgagatattgccaaacagggcgatgcttaacccgtagccgataccgccctcgatttgtgccttaatcacgtcgggattcacggcgataccgcagtcaacggcgcaccagactttatgcaccctaggtatgcctgcttctccaatcgacacttcggcaatttgggcaacgcgggtaccgaaggccttggcaacccccacgccgcgcattctgccgggcgtcgaggctggcccttccactgcgcggcttctgccaccgcgcgtaacacacccgcttctcgcggcgcgtcacccatcagcgccagccttccctcgaccggatcctgcccggtttcatgcagcagttggtcgataaagctctcgaccgcatgcccggtatgcgtactgccgacagaacgcagcgaggtcgtcggcacctgtcctggcaaaatatgcgcgtcacagcggaagttttcgaaggtgtacggcagctctttagccccttcaaccatggtgccgtcgataccgtttttaatcattgccgcgaacacactgccctcggcaaaagagtgccccgccacggtattagtccaggcgacaattttgttgtcctttattgccgcacggaaccgatgcaggatcatcggtcgataccaaccgttgcgaatgtcgtcttcacgcgcatacaccaccttgattccggttccgggaccgtaggccttggccaccaccgccatatccgccgcgaggtcaggcctggtgccctcaatgccaagatcgatacgcctcccgaaactgccccggccagaatagtttcgatatgcactttttctggcggcagctggaaatatttgcagaactggttttggtcgatggactggatctgacagccatatttggcgtgaacgctttcgccgtcccagaacagatatcccgccagcggttccatcggcgcatgggccaggtagggaaaggtatattcggcctcgatgattttatcggcatgtttgaaggcatcatccggattacctcgggtcgcggcgacagcgcccggtgatttggccttttctctaaactcggtaaagatctcttcggtactgcgcttctcggcgtttgattcgtcccacaccacctgaagtttttcgcgcccacgcatggcggcccaggtgttgcgggcatagaccgcaacaccgctggaggtcggtttcacggcaatcacgtcggggacttgcagcgtcgcgctggcgtcaaacgattgcagcctgccgccgaatcgcgggggctttttaagcatgacggtgaccatgtcctgctcatgaatatcctgagaaaagaaggccgtgccgttggttttagagaccgagtcaacccgatgaagaccactgactttgccgataagcttgaaatcctgggcattcttgagggtaatcttggcggtgtccggtgaaggaagctgagaagcacgcgtcgcaaactgcccgaaaccgcctgattgaccgctggcaacatgatgaataatcccgttctgaacggtgatttcgttttcaggaaccttccaggtctcggcagcggcctgaaccaacagcgcgcgcgcgatggcgcccatctggcgcatctggtcataggcattggccaccgagcttgagccaccggtgccctgcattcccaacttgaggtttttatacactgcggtatcgaccggggcagcaatgacgcgaacattggaccagttggcgtctaattcttcggcgaccagcgtggccataccggtgtaaacgccctgtccgacctcggtgtgcttgctgagcacggtgactattccatcggtgccaacctgcacaaaggcattggcggtaaacagctctgtccctgccttcgccgccgcaggagcggcgttattcgccgcgagcgcgctggctcttgctccgccaaagggtaaccaggtccctactacgagcgccccggcgccgataataaaacggcgtcgtgacagctgaacgtccggatttttcattgcacattgctccaaaagctacgggtattaacgtttatttttttagttgatctatctttgggcaatttccttctcggaaatacgcgcgaatgttgatgaatgacatgatgcatggcgtaatatcttgagtgtggcatcacaataaatgaatgtattaatgctgaactgatttaattaaagaggaagaaaaatgataaaaaataaaagcctaatctattttcccctcgaatataacaggctaaggaccttttgattatagctataaattgataaaggttatgagttgagccaataaatcccacatttttaatgctgacattaataatcagtaaaaacaacaatataagtaaaattaacaccattatcgttatataaaaaaatatatagcgaattgacattcatcttgcgaattaattatttttagctattaataatgataagactcctcaaactataaagtcactccatgcaaagcctggacctcagtgttatcaatcagtcgtgcctgtggattcaaactcagcccgtttggctgtgtaccgtgctgaatacatttggatcctcaccccgtcctcccggcgcattaatggtcattaacgaccaagggaattttctcggatcgttatcgggggctgtgttgaggatgattttattacccgtattcaggaaggctattttcgtcaaccgagccaaataatcaggtacggcgacggcggattgactcccgaccgcgttctcccctgtggagggatactcgacgtcctgattgaatatctcgagccggttcctgacagtgtcttatacctcgagaagataaaacaggggctggaaaatcataccgcgctacagaagagcatcacgccaccttcggcctgtcactctttatcgtcggtcgcctggagcagcagcaccctcattgaacgcaggttgcaggagattgtcattaccctctcctccgcgccgagaataatcattgccgggctctccgccgtggcggtttattgtgcggagtttgcggcaggtctcggctttgaaaccctcgtttgcgaacctcgcgaggagatgctggctaacttcagcggacagcttcgggcagagcaccggctggaaaaaatattccccgcccgttatctggaacaaaacggctgccatccgaacaccgccatcgtggcattaacccacgatccgcgcatggacgacctcacgatgatggaagccgtcaataccgaagctttctacatcggggtgatgggtcacagcgcaacagtaaaaaccggctggcaaggctagagcataccggtggaatgacgcccgctgagctagcgcgtattcatgctcctatcggtattgatatcggcagtaagaccccggccgaaatcgcgctggcggtcatggcagacatcgtgagaacaaaaaatatgccgcgttaacgccattgccagcggcttttcctctcttcacctcagtcatgaattgaactcataacaacaacctgattatgtctatagtcctcaatcgcccaaccgcctagtctctttctccagcaggtcacctcttcaccccctaaacgtaaaggagcatgagatgcaaaaacgcaaactcgggaaatcaggactggaagtctcggcgctgggcctcggctgcatggggctaagccacggttacggtccggcgaccgacacgcgtcaggccgtcgggcttatccgcgcggctttcgatcgcggcgtaacgtttttcgataccgccgaagtttacggcccttacctcaatgaggaagtcgttggggaagccttgaaacccattcgagaccaggtggttatcgccaccaagtttggcttcacctttggggacgataacaaacagcagatcctcaacagccgcccagaacacattcgtaaggcggttgaaggttcgctaacccggcttaacactgaggtcatcgatttactgtatcaacaccgcgtagaccctgaagtgcctatcgaagatgttgcaggcaccgtcaaggacctgatttcagaaggtaaggttaaacactttggcctgtctgaggctggcccacagactattcgccgcgcccacgccgttcagcctgttaccgcgctgcaaagtgaatactcgatgtggtggcgtgaacccgagcaggagatcattccgctgctggaagcgttggggattgggttcgtgcctttcagcccgttgggcaaagggtttttgaccggggctatctccgccgacaccaccttcggggccgatgatttcagaagcaaggtgccgcgctttgccgccgaggcgcttgaggccaatcagcagttgatgacccttatgaaccgtatcgccaacgacaaaggcgtgacaccggcgcagattgcgctggtttggctgctctcgcagaacgactggattgtgcctattccaggcaccaccaagctgcaccgcctggaagagaatctcggtgcggcagacctttcgttgaccgccgaagagtataaaaaaatcaattccgcgctcgaaaccgtccgcgttgtgggcgaacgttatcctgcctcactgcaggcgcgcgtcggtcgctagcggtttcgtgaggtcatcgtaaaaacacaaaggctgccgaagatcgcagccttttcattgaaccgcgccgctgacgcagtaacgagtcgcattaaatgaaaggtgcggacgatgagagttccagcagttgctcaatcacccgcatatccataacgtcttccaacgccagcgtttgctcccacagcgtttccgcctgcaagctcgatattgagcgcgtagccagcgacataaatttgtcgcgcagctgcgcgtcgctcatcggatgggtcggcgcgccgagggcgatatccacccgatgcgtaagactgatgccgtttttagtgaccagcgtgacctgcggctcgccgtcggcgctgtaggcagggtcaacctccagcaccacgcgtccgatagcttccagcaaagcgggacagcgccgctgctcgtcgccataggcgtccagtccggcgtgcccataaaccagcctcgcggccaccgcatagcgaatgctcatctgcgccgccgccagcgtacttatctgttcgtcaccgcacatttcctgtaaaaatggtgacagggtcactttaacctgttcaatttcatcgactgctccctccaggcggtcgagcaagatccccgtcgcatcaatcgccgagtgggtgccgcgacacgacgcataaggtttgatcgaacaacgcatcagtttccacacctgcccaaggtcggcaaccagcgctgatggctgtgcggtcttcgcagccagggttttcagaaaaccgccccagtggtcctcaaacaggccagcaggtccggttatccccgcttgtgcactcaatgcggccagaacgcctccctcggccgctctgccggcgtgcagttttttgctctgtgaaccgtcgtgaataaacgcccacagcccgccgctaaagctgcccgcgatacccaacgccgacgagatctgtgccttatccaatcccaagagacgccccgccgccgctgcggcacccaatacgccgcaggttgaagtagaatgccaccctgcgccattgtgggcggaatatcctccgcaggcttcaagcacccgacgcgcgatgtcgtaaccgagcaccacggcggtgataaacgctttaccgctgaccggctgcgggcaaaaaggcaacaccgccagcagggccggaatgaccaccgcacccgagtggtcacagccgccggtgtcgtcgagttcgagcgcatggcaagcgataccgttgagcagcgccgcatttcgcgcagaggttttctcgccacgccccacagcgcggcaacgggcgctgcgccctctgccagcagtatcgtgctcacgtctttcgccacctcgctggatgcgcccaccaggcccgccccagcgtatcgacgatatgccgctgggtgcgcgtcaccagctcaggggtaagtcctcgaagcgggtatcatgaacaaatgccaccagctgcgattgaaagtcctgattttcactcattgctgcccccgttttgcgtatgctgctgccagatttgtgccggatgcgagggctcattctgcggctgcgtttgccgccaccagtcggttacctcgcccgccgtcgccacccagacatctggccgcgaggtgatatcatccagcagttcactcaacaggccgatgcgccccgcggtgccgatcacctcgggatgcagtcttagcacatagcaaagcccaaaacggtaaaagccgtcaaaatccatcttcatgttgcccagcgtatggctgtaggacgcgatgcgcgactgcgccggaggcaccgctggactgaggttgaaggcgaaatagggttcgtcctccagctcatagtgcagcggcaactcaaccaactgcgaaggcaaaccgtcgcgcatcggctgaaaataaggcaggtcatcgccgcgccatgacgaactccagccaatccccgcctcgctcattgcctcggcaaagcccgctgcccagttgcccgaaggaagacgaaacccgcgcggcgtctggccggtatgcgccttcaatgctgcctgaccccgctgcaaactggaaacttgttgttctaaggtcaattcatcaaatttttcaaactcgtagccgctggttgccagctcgtgaccggcgcggaaaatctgcgtgatcttatctgcatgctcatcggcaactcttcccggcacgcaccagctgctgcgcagattcttttccgccagcagcgctaacagccggtcgactccgcgcagcgtgccgtagcgccagaccgacagcgttttctcgcggccggccaccgccggaacctgactaagaatgccctgcacatcgttaaaatcgacggtgatcaccaccgcacagcgcttgccctgcggccatttgtcctgcgtcgcgttctgattaatgggcatcgacgtgctcctgtaaccaccagtgggccacctcgcgacagcgcgcaaaccacacgtcgtcacgggtgcgaagatgggcaaagaattgttcgagcagcataatgcggcccggtttcccggtaattttcgggtggaacagcgtggtcaaactcagcccttcgttcattgcgccgtcaaactcgcggcaccagttgtccagcgtcagcgcgtagcttgcggtgcgatcgagccccgacggaaaattgggctcgcgggtgtaggcaatcgaggcgtagtcgtccatctcccaacgcccgggatctccaccagcggcttatcaaaacccggcacctgaatcagataaggccggtcatcgccgcgcatgctgctcgagtaagttacgcctgcttcgaccagcatggcaggggtatcctgatgccagtctcccgacggggtccggaaaccctcggcgcgaataccgaggttattccagaaaatctcgcgggatttttccatcacccaacgctgcatttgcgcgtcgatggcgtagaaagactcatgacgataaccgtggtacgccacctcatgaccgcgctcaacgatcgcctgacactgcttcggccagttttcgaccacccaggccggcacgaagaaggtcgccggcagctgatagtcgtcgagcaggtcgagcagcctcgccagcgcccgatatggcccatagcccccgaaggtaaaatactcgggcttgtgccagagcgtgccgttaagcatcgcatcgccggtcggcccgtcgaggtcaaacgccagcgccatgcagcccatttatcctgcggccaccgcgtagccagattggaaatcgtcatcaattatcccgctccagaggtagacagttacttgcctttatttagggtaacttcctgaatagcgccatcctgtaatccccatttagtgaggattttcagataggtgccgtcagcaatcattgcggtcagtgcgcctttcacgccgtcaataagcgcagtatcgtctttgctgatgccaataccggtcacctgataggcaaaggctttaccgagcggcttataggtgtctttttcaagattcatgatgtatggcagggtttcactgccctgcaccacgccctcgatacgcccctgacgcagctgggtgcgcgcatcggcagtgccctctgcgccgaccactacgacagccggtttacccgcaggcgtacagtttgctgcgctccatgccgcaatttccgccgggaaggtcgttcgacggctggtgcccacctttttgccgcacaggtcgagcatggtgttgatctctttatgcgccacggtggtgtagaactgcggtccgctgttgtaatagtcgacgaaagtagcaatctcctgacgcggtttggtgtccgtcatgccagaaagaatcatgtccacgcggtgggtcgccacggcgttaaccatctgttcgaagccaatttcctgccagctgattttgcggttcaggcgtttacctatctccatacccaggtcataatccatgcctgtgagctggtcagtcgccgggtctttgaattccagcggggatagttgggcatcatcgccactttgatttcatctttctgcctgagcgcatcggcggccgaagcgccctgactccaaacagcggtattgatcaacacgcctgcggcgaccagcgataacagtgtttttttcatcaaaagatttcccatgtgtaaagtttctagatcagaaccgctgaaataaaattctgcgtccttgggttttgtggattcagcaagacatcttccggattaccactttctataattccgccctcgtccataaagaccacgcgattcgcgacctctcgcgcaaaaccaagctcatgagtcacgacgatcatcgtcattccctccgctgccagactgcgcatgaccgccagcacttcgccgaccatttcagggtccagcgccgaggtcggctcatcaaacagcatcagcttcggcttcattgccagcgcacgggctatcgccacacgctgttgttgtcctcccgaaagctccatcggataggcgtcacgcttgtgcgccagcccgacgcgttcgagcagcgcaatcgcctcctcttttgcctccttgaccgggcgcagcagcacctgacagggtccctcgatgatgttttccagcgccgtcttatccgggaacaggttgaagcgctggaacaccatgccggtcttgaggcgctggcgggcaatctgccggtcattaagcggatacagcttcttgccgtccatccgataccccaccaactcgtcatcgacccagataccgccactgtcgatgcgctcaagctgattaatgcagcgcaggaaggtgcttttccccgatccactcggccctatcacgcacatcacttcaccgtgccggacctcaagactgatgtttttcagcgcctgaaaatcgccaaaatacttgtttacgttcaacgccttgatgatgtttttcatgagagatcctcaccggttgcggcggcgagtaccgcggccgaaataacgttcaagacggttttgcccaagggaaagcagcgtcaccaccaccaggtaccagataccggcgacgaacagcagttccatcacgcgcgcgttggcgaaatagatggtctgggcgttatacagcagctcggaatactggatcatgctggcaagactggtggtcttaaccatgctgataaattcgttgccaattggcggaatgatcacccgcatcgcctgcggcaaaatgatgcgacgcagcgcatgtaggcgggtcatgccgattgacttcgccgcctcatactgacccaggtcgacagaaatcagcccagcgcgcactacctcggaggtataggccccctgattgatgctcaggcccagcaaagcggccgagaacggggtcatgatgtcaacggtttgcagttgaaacagccccggaataccgatggtcgggaaaatcaacgccaaattgaaccacagcaaaagctggaggatcagcggcgtaccgcgaaatatccaggtatagccgatcgccacaccgctgagcaccggattgctcgacatgcgcatcacggcaataatcaccccaaaaatcacccccaacgccatcgcgagaatggacatcacgatggtgttacccagaccaaacaggatggcccgggcggtcagaaactgccccacaaagcgccattcaatttttccgtgggcaaaggcgttaatcagcagcgccagcagggcgaggataatcaccgaggcgacaatacggccgtagtaacgcctgggaacatagtgatattcgctgagatcgacagcgggactctttagcacggtattagcacgtaagtctgtcatatgaggctcccgaggcggttaaagagacaggccgatgtacgacgcggcccagtccgactgctgctcaagcaccgttttcaggcgcgctatctgttcggcgacgcgctgcggcgaggtgccccccaaccgctgcgggcgtgaatggcggcctctaacgtcagacactcgcgtacctccggctgcaggcgagagtccacctcttgcagctgcacgtcgctgacctgatgtagctcgaggcaatgctgttcacagacctgcaccagcttgccagtaatctcgtgcgcctctttgaacggcacaccgcggcgggagagccagtcggccacttcggtcgccagcgtgaagccctgcggtgcgtcctccttcagccgctcgacgttgaccaccatggtgtcaatcatcccggccatcgcaggcagcaccagcatcagttgctcaacggtgtcgatggcgttgcgtttgtcttcaataaggtcgcgattgtaggacaacggcaggcttttcatggtcgccagcatcgccgtaacgttgcctatcaggcgaccggttttgccgcgcgccagttcggcgatatcggggtttttcttctgcggcataatggaactgccggtggcgtagccgtcgttgagttctacccagcggaactggcgcgacgcccacaggcaaacctcctcgcagatgcgcgaaaggttgaccgcgagcatgctgcccgcaaacaggaattcggccacgtggtcgcggctggcaacggcgtctatcgagttttcacacgcgccgtcatagccaagatctttggccgaaagctcgggatgcagggcgattgccgaccccgtcatcgcggcagcgcccagcggagagcgcgcgcagcgtttatcccagtcctgaaaacgctgtacgtcgcgcgaaaaagcttgagcgtgagccattaactgatgaccaaaaacgatcggctgtgcctgctgtaagtgggtaaaacccggtgccaccgtgttgatatgccgctcagcctggttcaccagcgcccgttgcagttgcagcagcgcagcgactatcttgcgggcgttgtcgcgcaggtaaagccgcaggtcattggccgtctggtcgttgcgtgaacgccctgcacgcagcttgccgccgagttctcccaggcgctcagtcaatacccgctcaatgaaggtgtgtacgtcctcatcgttctcgacaggctgaacctctccggcgcgatagtctgccgccagctgtttaatcgctgccaccatgcgttcggtttcgccctcgtcaagcaggcctgcgcgctggagttcataggcatgggcgcggcagccttcgaggtcatattcggcgagtgcaaaatagtagccggggctgcgtgacagcgcgctcaaggccggtgccggaccttgtttaaatcgcgcgccccaaagacggtcaacgggctgagacatgtcgtactcctttctggcatagatgttgcaaaaatgatttaacaaggcagcgagacgtgggccatttttacggctcatcctggggaaactgatgatgcgaaaaatataaaaaaagatctgcttgccatcatgaaaatataaattaagaaacttgccttgattcgatgttggatttatttgtaccgggggtaaatatttattatggaaagtccactttccaaatcaggaaactcgccctccatcagaaatgatgttaatcagcatggcattggggtcgctgatctaaaacttttacgcgtttttaaaaccgtggtcgaagcgggaggatttaccgccgcctgcaatgaactgaatattggcctggcggcaatcagtaaacaaatttccgatctcgaggtacgttttggaatgaaactctgcacccgaggccgtgaggggttttatttaaccgagcatggcaaagtgacctaccaggcctgtctcgacctgttttcgtcgatcaaccagttccgcgacaagctcaataatgcccgccacgacatgtttggtgagctgaacattggcatcatcgacaacaccattaccgactcaacctcaccgattattcatgcacttggtgagatttactgcaaggcgcccaaggttagcctgcgcctgcacgcaacccagctcgacgaaattgaacgaggcgtgctcgacggacgctttacctgcggaatcatgccggtgtatcaggaaaagcccgagtttgattactactatctctatgaggaaatagcacatctgtactgcggtgataaacatccgctctattgtttacctgaagatgaaataactcaggcccagataaaatccgccgaagtcgtcaatcacttttatgccaatcacagcgagaaaaataattatctcgaatacggctcatcaaacgccgtcgcggttcaggttgaagcggtgagcctgcttattttaaccggaaattatattggcttcctgccaaagcattttgccctgcacctttttggtggtgagaaattaaaagcccttctgccgaaagaaatatcaatagcgacgcccttcagcctggtggtgaaaaaaggcagcgcattaaattcggtattaacgctatttcttcaggcattacagcagaaagcaaaatcaccgccgctgcggtcggcgagctagaccatcgtcagttttttaggtttactttgcaccaacgcattgcaccataaaggcacaatgcgtcagattttgcagcgaatgcaatagaggattaaagcttgagcgcgtcggccatcgcttcaacgcgggcgaaagcggcatacagcgattcggcagagaccggatgcggcatattgtgcatgtctggcgcatgcagcgaagcctgaacgatgctttcgagctcttcatcactcaactctgcaatctcgcgtaaacgtaaaggcaccgcgcaggcatgagacagcaatatcgcttcgcgaagctcgtcatcgctgcggttctccagcgccaagaggcaaagattgcccaaccccaccagcagtccatgaccaaactcgcgggtcttgtcacaaacggtaaaaccttcatagatggcgtgcgatgcagcggcgtgcgccccgctgctcatcagcgacgttaacccggcaaacataaagatagcatccaatacctggtccagttcagcgctggtcttgccttcacgcactgcgtcacaggccgcgccgccgtaagaggctatcaggtcatagcaaatgcggctgttggcgctggaggatcgcgcgacgccgctcagcgcggcgtgatggctgctgatggcgcgaaattcataccatttcgccaacgtgtcgccgaggccagccgccaaccaacgcagcggcgctttcgacaacagctcactgtcgatgatgacgctggccggtgcctgcggcagcggaaaaaggtcacgaaagtgtccgtcgtcaaaatagcgaatggtcagcggcgttacggcggcacaggtcgcggcgacagtgggaatagtgacaaccggtacctgggccgctgcaccgacggctttaccggtatcaagcgacttgccgccgccaacgctgagaataaggtcggccgacagcgttttcacccgctcggccaaacgcagaatattgccctcgctggactcaccgccaaaccactcggtgcctacgacagagaccggcgtcccttcgaggtaatgattgattttatcccctacggcggccaaggcctgatgcccgccaatcaccagcgcgcgcttgcccagcaggctgcaaatttcgcccaactgcgccaatacgcccggaccgcgcaggacctgcgccgggaaaataatattctgtgcgtgcatgtaccgcctctctcaacttgcgtaatagtgatgttagcaggctaccgggtagtagccgatgggaacgggtaagcaatttatacgccacagttcaaaggccgtgacgtaataaatgggtgccagctgacacggcactctctctcacagggtttgcgttattagccagttaaacaccaaggcgaccagaagatgctctcttctgcccgcctttttaatccaaacccctgacctcatcagagcatcggcaggttcagctcgtgggttttggcacattcgatcgcctgttcgtaacccgcatcagcatgacgcatcacgccggtggccgggtcgttgaacagaacgcgagccagtcgggcatcggccgcctccgtaccgtcacagacaataaccatccctgcgtgctgcgagaagcccatgcccacgccaccgccgtggtgcaggcttacccaggtcgctcccccgcagtgtttaacaacgcgttgagcagcggccagtcagacacagcatcggaaccgtctttcatggcttccgtctcacggtttggtgacgcaacggaaccggtatcgagatggtcacgaccgatgaccaccggcgctttcagttctccgttgcgcaccatttcgttaaatgccagaccggcgatgtggcgctcacccaaccccagccagcaaatacgcgccggtaaaccctggaaggcaattcgctcacgggccatgtccagccagttgattagattagcattatccgggaacagctctttgagtttggcatcggttttatagatgtcttccgggtcaccggacagcgctacccagcggaacggacctttgccttcgcagaacagcggacgaatgtaggcaggcacaaacccagggaaatcaaaggcattttcaacgccttcatctttagcaacctgacgaatgttattaccgtaatcgacggtgggaatgcccatcgcgtggaaatcgagcatcgcctgcacgtgaacggccatcgaggcacgcgccgctttgaccaccgactgtgggtcggacttacgcgcctcttgccactgctcgagcgtccagccctgcggcaggtagccgttgagtgggtcatgggccgaagtctgatcggtgacaatatccggacgcaatccgccctgctgcgcacgtttcaccaactcaggcataatgtcggcggcgttgcccagcagacctacggaaatggccttcttctcggcgcaggccttttcaatcatggtcagcgcttcgtcaatgctgtgtgccttgtagtcgagatagcgggtacgcagacggaaatcaatgcgcgactcctgacactctatagccagcacacaggcacccgcgaggacgcccgccaacggctgcgcgccacccatgccacccagaccggcggtgaggatccacttgccgcgcaggttgctgtcatagtgctggcgacccgcctcggcgaaggtctcataggtaccctgaacgatgccctgcgcaccgatataaatccacgaaccggccgtcatctggccgtacatcatcaaacccgccttatccaactcatgaaaatgctcccagttggcccagtgtggtaccaggttggagttggcaatcagcacccgcggtgcatcggtgtgggtgcggaaaatgcccaccggcttgccggactgcaccagcagcgtttcatcttctttgaggctgcgcaagctggccagaatcccctcgaacgccggccagttgcgtgccgctttgccgatgccaccgtacaccaccagatcttcaggacgttcggcgacgtcgggatccagattgttttgaatcatgcggtaggccgcttcaatcagccagttctgacagctcaactccgtgccatgcggggcgcgaatgacgcgggcaacggcggttttctgcggtgaattcatttttcactccttcatgatttaaacgtcagtattcaacgtattttttaagattaacgaaagcttggcagcagggactgaatcggctcaggccagtgttcacggctggcccacaggcgcatattttcgacatccggcgccatcaggcggtcgcgctcgaggaaggccaccttctcgcgtacggcgttgatttcaccttcgataatctcggagctgcgcagcggacggttgaaatcgatgccctgcacggcggccatcgcctcaatgccgaccactacagcggtgttaaagcacatatcccccagacggcgggccgcataggtcgccatcgacacgtggtcttcctgattggcggaggtcggcagactgtctacgctgccgggatgcgccagcgatttattctcggaggccagcgcggcagcggtcacctgcgcaatcataaagccggagttgacgccaccgtcgtgcaccaggaacggcggcagaccagagagaccggtgtcgagcagcagcgcgaggcggcgttcagagatggccccaatctcggccaccgccagcgcaataatgtcggcggcgaaggccaccggttcagcgtggaagttaccgccagaaatcacgtcgccgttctcaaacaccagcgggttgtcggacgcggcgttggcttcaatttgcagaattcgcgcagcatgcttgagattatcgaggcaggcgcccatcacctgcggcacacagcgaatcgaatacgggtcctgcacacgcccgcagttcgcgtgagaggtgacaatgtcactccctgccagcagcctggagacggccgccgccaccgcgatttgtccctcttgtccacgggcttcgtgaatacgcgcatccaaaggtttgactgaacctttaatcgcctcgagcgacagcgcaccggccaccagtccggcggcgaaaacacgctcaccctcaaacaaaccacgcagcgccagcgaggtcgaaacctgcgtaccgttgagcagcgccagaccctctttaggccccagcacgaaaggtttgaggccgacagtcgccagcccttccaccgcagatattttcacgccgttaacgcggacctgaccctcaccaatcagcatcagagaaaggtgcgccagcggcgctaaatcacccgatgccccgaccgagcctttttcgggaatgcacggcatcacgcccgcgttgaacaacgcaatcagcgcctcgataacctcaatgcggataccggaatggccgcgagacaggctgagtactttggttgccatcaccaggcgtaccacgttgtccggcaggtcttcgccaatccctacgctgtgcgacagcaccagattgcgctgtagttcggccagacgttcggccgggatcatggtttgggcaagcttgccaaaaccggtgttaatgccgtaaaccacgcgtccctgctcgacaatgcgctgcacagtttcctgcgatgccagcacatcggcgcgcgccgaatcagccagttctatgcgcacattgccctgataaattttacgcagcgtggccaaatcaacctgaccgggttgcagatggcaaagtgtcatatctttggatgaagaagccataatctattcctgtatagacaagttaagtgaaacaaattcccgggacggctgaccgcccgggatatcggttcgtttgcggaaaactcccgccgtaaataggtgactgtaaagcggttaccgttaagctagtgctcttgcgcctgtagcgtctcgacgcgtatttcttccgttactctggcctttaatgccatgaattccggcgaggttttgagtcgatactcacgaggatgcggaaaatccaccgccacctcggtcttgattcttcccggccgtgcgctgaaaatcgcgaccttattggccataaaaatcgcctcgtcgatatcgtgcgtcacgaaaagcacggttttgcgcgacgactcccaaatcgacagcagcagttcctgcatcatcactcgggtctggttgtccaacgcgccgaacggttcgtccatcagcaggatttttgggtcattggccagcgcacgggcgatggcagtacgctgctgcataccgcccgacagctgacgcgggaagtgatgctcgaaaccacgcagcccgaccttgttaataaagtagtcgctacgctccttttgtgccgctttgctcaccccgcgctcttcgaggccgaaacagatgttttgctgcacgctgagccacgggaacagcgtgtagctctggaaaaccatgccgcgatcggccccggcccttctacccgttcgccgtccaaccacacctcgccacgcgttggctggtcgaggccggcaacaatgcgcagcagcgtcgatttgccgcagcccgaaggcccgaggatggtgataaaatcgttttcattgacctgataatccaccggcagcagcgcctgcgttttctcgcccttcgggccggtgaagatgcgttcaacctgtcgcacgctcagcttgggtttattcatttaaatgcgctccagacaaacaggcgacggttggcggctttaaacaggaagtccgacagcaggccaatgcagccaatgacgataatgccgaagatcatttgtcctgtgttgagcatcgcctgactgtcgacaatcatgtggcctatcccgcttgaggagccaatcagctcggcgacgataacgtaggtccatgcccagccgagcaccagacgcagcagctcggcaatctccggtgcggcaccgggaataataacccgacgcaccacgctgcgattggttgcccccagcgtatatgccgcttcaaccaggtcgcgacgcgctgcgcccaccgtcacggccaccatcagggttatctggaagaatgagccgatgaagataaccagtattttttgcatctcgccgataccggcccacaggataagcaacgggacaaatgccgaggcgggaagatagcggcaaaaagagacgaacggctcgaagaaggcctcgataagcttgtaagagcccatcattatccccagcggaacggcaattattgacgccagaacaaagccgcccaacacccgcatcaccgtcatgccgatatcattggcgaagtcgaactgggtaaacagcagccagccctcttccagcatactggcaggattcgctaaaaacgtcggcgacaccacgccggtgaaggtgaccagcgcccaggcgacgaaaaacaccacaaagaagcagaaacccaaaaaccagcgttggcggctgggcacgggccgcagcggaaccatcatcgggttatgccagacctttttgctcgccggcaaaggtcccggctcgcgttgaactgactcggagggttcctgcggtgcatgagtaataggactttgcatcaacgctcccttcatgactatttcgcaaccgtggcgttattaacgtactgaggatcgaacaaggtactgatatcgggcgttttacgcagaatcttcatctccgtcagcaacgttgccgcctcttgactgaagcgggttatctcaccgctgaagaattgtttgttctggttgagatcttgccagcgcagatagctcgactcctctgcaaactgcttgccggtttccttcaccgccgcacccatgatttcgttagatttttcggggtctttcttgatcatgtccagcgcttcaaagtagctgttgaccagcgcctgagccgccttgggatttttctcgaggaagctcggcgtacagcccagggtatccatcaccatcgggtattgcagcgtggtggcgaggatcttgcccttgtccgggctttggcgaatggtggaaagatacggctcataggtcaccgcggcatcattttgaccagcgataaaagcgtgcgcggcggcgtcaggccccagagtcgccaacttgacgtccttgacgctcatgccgtttttatccagcatccaggccagcaggaaataggaagacgtaccgggggcgtcaacgctgatggttttacccttcaggtctgaaatcttgttgatgccttgacgcaccgcgatgccgtccgcaccgtaggacttgtcgagctgcactatctgcttgatagcgacaccggctgcgttccaggtcagataggtttcaacggtggtggccgcacactgcaaggaacccgaggcaatcgccagatggcgtgactgctgagggacactcttcagggtgacgtcgaggccgtttttcttaaagatgcccgccttgtcggcaagcgtgagaggagcaaaacccgtccagccagaaataccaatagcgaccggggtatccgccgcctgtgccgcgcctgcgctaatgccccccagcgccaccgccagactcaataaggtgaaggattttttcattccggctttagaaaacacgttgttcatttgccactcccgtcgaaaggtcctgtcttggaataatggctcgccgaagaggagagccgtgccactgtctattcttgtctatacaagctggtttatagattcagcaaactttatgccacttttgaccgcgtcagaaaggtcgaaaaaaacgggctggtgattgaattaccggctctcagccaccttattgggtgtttatccaccagacttatccggcaaggagattaattcggtgcagcatgcgcgctattttggcgcatgactttctgctcacagcggcaaaatcgccgcccacagcagcaggctatcgacactcctggcgcgcaacagcagttcgagcgtgacgtcctgcgtgttgctccacaccactccctgattagcggttagccgcttttcgtcctgcaacagccattcgcccttgagcaccagcaacacgcctcccatcaacagcggcgcgcagaagtcgtactccttgcggctgaccaccgaacggcaagtgccgtgacgggtcataatattgaaatcggtggtggtcccgccgataagcgtcgaggtcagtggcacttcgccggagaaggcaaaaggttcgccgggcgtggtgagcaggtgatccacctgcccttcggcaaacaggtgtacgccctcgccggtcagtaaggtaatggagcggtcgatgccaggaaacgccgagaacgggccgtcctgcgcaatggtggcaacgctggcgcgccagttaaagtctttggcgtcctgcggcatgctgataatttcgcgggtttcgccaccgccgttgcgccagggtgtgacaggcaggctgtcgatgctgaaaaaggttaacgaatcgtggaaacgcatagtggctcctactcctggcccaggagttttagcaaggcgagaaagtcggccgccgcctctgcctgctgcggatgacggcctgcaataattttagcctctcccgccacccatacgtccttaatttgtgaggcattgcccgcaaataaccaacgattgagcaattggccgtcgtctgccgcggccagatacgggcagtctgggtccagcaccagccagtccgcacgataaccggccgcaagttgaccgattgctatcgcgcaggcctgtgcgccaccggctaacgcctgcgtataaagcaggtcgcccaccgagggttgctcggcggtggtcagacgattgcgtcgcgtatcgcgcaggcgctgaccatattccaaccagcgcagttcttcgactacgttgagagaaacatggctgtctgaacctataccccaccggccgccgagggcgaggtaatccacgcccgggaagatgccgtcgcccagattggcttcggtggttggacaaagacccgcgaccgccccgctctgagccagctgtttaagctcggagccgtcgggatgcgtggcgtggataagacaccagcgtgcatcgacctcaaaatgattaaacagccaggcaataggccgctgaccgctccacgcgaggcagtcgttgacctctttgatctgttcggagatatgaatatgcaccggtaaatcactgtcgctggcggccagcaccagctgcatctgctcgagcgacaccgcgcgcagcgaatggaagcacagcccctgattctgcgtggcaaacccgttaatctgtgaggcaatagtctgctgctgacgaagatagctgtcggcgtcctgaatgaaacgacgctggcccggctgcggcggctgagcgccaaacccggcatagctgtagagcaccggcagcagggtcagcccgatccccgcctgcacggcggcgtggctgagcgcggcggtcatctcacccgcattggcgtagggcttgccctgcgggtcatgatgcaaatagtggaattcggcgacctgggtatagccgcccttgagcatttcgatgtacagctgacgggcgatgacgccgacctgttcgggcgtcaggcgaccaaccatgcgatacatcagctcacgccaggtccagaagctgtcctgcggattacccgccacttcagcgagcccggccatcacccgctgaaaggcgtgagaatgcagattcggcatgccaggaatcaccggccccggcaagaccctcgcgtcatcggcgctggagtttggcagcgcttcagtgataaaaccgtcactgctgaccacgagacggacatccctggcccagccgtcaggcaataaggcgcgggaagcgaaatatacgggcatggctgccttcctgattcagtgtgttaaaaacagcaaaatagaaattttaagcaacttttgagattttattcatcagcttgtctatacatatacatacggcgctgagaactgtaaactccagaccttggatttttgaagaaaattttaataatagtgaggtaagtggcatgtctgaccaatcgttgtcggaacaacaggtggtgtcacagcaaattctgtcgcagctctctgcggcgattagcgatacaccggcaccgatttatcagcgcgtgaagcaggcgattatcggccagattcgcaccggtgtatggcaacctcatcagcgcgtgccgtcggagagtgaactggtcaacgaacttggcgtcagccgcatgaccatcaaccgcgcactgcgtgagctgaccagcgaagggttcctgatccgcatgcaaggggtgggtaccttcgttgccgaggccaaggcctacacgccgatgcttgaggtgcacaacattgccgatgaaatcgccgagcgcggccaccgccacagcagcaaaattctgatttgtgaagctcgcgcggcggatgccgaacaggcgttgcagctcggcattgcacgcggcgactccctgttttattcacagatcgttcattacgagaatgacgtcccggtgcagattgaagaacgctgcgtgaatccaaaaaccgcacccgattacttacagcacgtcttcaacaaccggctgccctatgactacctgatgcaggttgccccgctgacctccggcgagcatcgcgtggaggcggttagcgccagcgccgagcagagcggtcatttgcagctcaaagagcacgagccttgcctgctgattcatcgtcgcacctggagcggtaatcaggtggtaacctcggcgagactgctgtatcccggctcgcgctatcagctgtttggccgctttaccagccacggctaagccattgtgcacggcggccagtagattgagaaataagaaaaagctatcgctctcccgcttgccgcccgggattttatgcgttagcttgcctgtggttgtctatacaagatacgttcagtcaggagattctcatggcggcacccttgcattcagcgtcccctttcgcgggtaaaaccccctgcgacagcctgtggtttggggcggatttcgtcaccctgcgcgacgggcgctacaacatcatcgaaaacggcgcgcttgcggttaaagacggcaagatcctgtggatcggcccgctcagcgaatgcccggacttttcggccccccagcgcaccgactttggcggcggcatcgtgacccccggttttatcgactgtcatacccatttagtctttggcggtgaccgtagcgccgaattcgaacagcgcctcaacggcgttagctatgccgaaattgccgctcagggcggcggcattctttccaccgtcaacgccacccgcgatgccagccactcacagttgcttgagcaagccgaatttcgcctgcgtccgctgctggcagaaggcgtaacctgcattgaaataaaatccggatatgggttaagcgttgaaagcgaactgaaaatgctgcaagcgatccgcgagttgggcgcgacgcaggcggttgaggtcaaatcaacctgcttagccgctcacgccgtgccgccagagttcaaggggcgggccgatgattatattgacctgatctgcgataccctgctgcctcaggtggcacaggaaaatcttgccgatgcggtcgacgctttctgcgaacatctggccttttcacccgcccaggttgagcgcgtgtttaacgccgccgcatcgctgggactgccggtcaagctgcacgcagaacagctctcatccttgcacggcagcaccctcgcggcgaagcatcacgcgctttccgccgatcatctggaatacgccaccgagtctgacgctgaggcgatggcagaaagcggcaccgtcgcggtgttgttgccgggcgcctattacctgctgcgtgaaacccagtgtccaccggttgagctgttccgtcgtcacggtgtgccgatggcgctggcgagtgacgctaatcccgggacttcgcccgcactgtcactgcgcctgatgctcaatatggcctgtacgctgtttcgcatgacgccggaagaagcgctggccggtatcacctgccacggggcgaaggcgctaggattacaggaaacgcacggcacgctggaaagcggaaaggtggccgattttgtacactggccgctcgcgcgtccggctgaactggtttattggctggggggcaactgccctgcaccgtggtttatcgaggagaaattcgtttatgagtcttgccgatccgtttgaatttattcagggcagcgcgccgctgctgatcagtattccccacgccgggacccatcttacgcctgaagtcgctagcggcctgaccgacgccgcgctgccgctttccgataccgactggcatattccgcagctctacgattttgccaaggcgctgggcgcgagcatgatcatcggccaatattcgcgctttgtgattgacctcaatcgcccggccgatgacaaaccgctttacaccacggccaccaccgggctgtatcccgataccctgttcgacggtcgtgcgaccttcaaagaaggccagcagccgagcgacgaacagcgtcaaggttatctgaacgatatctggcagccctaccatcaaaagatccagcaggaactggcccgcctcaagcaactgcacggctacgccatgctgtttgacgcacactctatcgcctcggttatcccacgcctgttcgagggtaaactgccggacctgaacctcggcaccaacggtgggcttagctgtgcatcgggactcagcgacgtggtagagggctgctgcaccgcgcaggataaattcacccacgtgctcaacggccgctttaaaggcggatacatcacccgcgcctacggccagcccaaccagcacctgcacgccgttcagcttgagctggcgcagtgtaactatatggaagagattgagccgtacccctatgcgccgcaaaaagccgagcccttacaggcagtgttaaagcagatgctgggcgggatgctgcattggggtgaacaggtttataaataagcctgctaagccttggcaatgaccaccacactgccaaagtcgctggagctgcggccgtataatcccgatgagtcaccgcaggtcagtgagattcgggtcaatatgcgcgacgccgcttcagggaggcggaaggttattcattaaataaccggtcatagacgtgttgcaaatgcagctgcatcgccttcttggccgctgtcgggtcacgggccagaatcgcatcggtgatggcctggtggtcggcgttcatctccagcggaaagtcagtctcggcatagtgtgcctccaggcggacaaagcgcgccgactcacgcttgttccacagatattccatcatatcgcgcagcacttcattgccggtcatctcgctaatcatcaggtgaaagcgtttatcctcctgcaagaaatcctgattgttgatgttcaactgcgtcagttcacggttgatttcagccagcttttcgcgctgatcgtcggtgccgttcaaggcggcaagctcggcggtggtacattcataaatctggcgagccttcaccagcgattgcaggctgaattcctcttctgccggtgcgctcgactgcgtcggcagtggattattgacgtaaacgccattcccggtgcggatctccacccagccggttatctcaagagcaatcagggcctcacgaatcgatgaacggctgacgcccaactgcttcgccaaatcacgctcagaaggaatcatctgccccggcaaaaattcaccgccgttgatatacccgatcagcagattggaaatctgacggtagagcctttccacttttagcgttggtaattccattttattcctcgaatttgattctgctatcgcgctgatttatcaggctctgataccgataccgcgccaatatgactgcgtctatcatagcgcctaagccccgactcgtcgcgcactgccccatttattggatgatcaatattgcagcaaggatcacattaatttacttcagactgctgaattatacacaggcctgatggcctgaccagcagacgattgggccacaagattattattactgaccgaccctacgataaaaaacataagtaaggacaggctatgcaaacctcttctctggacagcgtgctgccggaaacactcgccagatcgaataaaataaagcgcattcagaccctttccctcaccctgctgttcatggcagggatcgttaattttctcgaccgcgggtcactgtcgattgccaatcaggccatccgcggtgatttaggactttcggccaccgagtttggctttctgctgtcggcgttttcactctcctacggcatctcacaactgcccagcggcattctgctcgaccgttttggcccacgcgtagtgcttggcggcggcctgctgttctggtcagtgatgcaggccctggcgggcagcgttaacagcttcagccattttattatgctgcgtatcgggcttggcatcggcgaagcgccgtttatgccgagcggcgtcaaggtggtgaacgactggtttaacgtcaaaaaacgcggcctgccgatgggcattttcaactcctcgaccacgctcggtcaggcgttcgcgccgccaattttggtcgccctgatgctggcgttcggctggcggatgatgttcgttatcatcggcgtggcgggcatcgctatcgcgctctgctggtacgcctggtaccgcaatcgagatcaaatcagccttagcgccgaggacaccgcctatctcgacagcggcagcaaaccgctggtccaaacccgccttagcctgcgtgaatggggttcattgtttaaacgtcgcagcgtctggggatgattttaggcttcagcggcgttaactacaccggctggctctatctggcctggttgcccggctatttgcaggccgagcgcggtctgagtctggctaacaccggctgggttgcggccattcccttcctgtttggctcgcttggcatgctggttaatggtgtggtggcagacaaactggccaataaaggttactcgctgttaagaagccgaaaggcgctgatttgctttggcctggtgtgttcggcggcctgcactctgctggttatccagtcttcgagcactgccgaagccgtcgcctttattagcctcgcgctgttctttatccactttgctggcacctctgcgtggggctggtacagattatcgcaccttcgcgcatggtggcttcagtcagcagtattcagaactttggcagctttatctttgcctcttttgcgccgattgtgaccggttgggtgctcgacaccaccggctcgtttaactgggcgttagtggtgtgctcatgcgtcacctttgccggtgcgctgtcctatttctttatcgttaaaaacccaattgaatcggctgcaacagcctgacccatttgccgccaccgctcggcggcgctgatgaaatacaaggagtaaaacatggagcaaacatggcgctggtatggcccaaaagacctggtttcgttggatgacgtgcgtcaggctggcgcaaccggcgtggtcaccgccctgcaccacattcctaacggtgaggtgtggccgattgaggaaatcaaacagcgtcaggcggaactggccgagaaaggcctggtttggtcggtggtcgaaagtattccggttcacgaagagattaaaacccgcagcggacagtgcgaacagcatattgccaactaccaacagtcgatgcgcaacctcgcggcctgcggcatcgatactatttgctataacttcatgccggtgctcgactggacccgcaccgacctcgggtatctgttgccagacggctcgcgcgcactgcgctttgaccagacggcctttgcggccttcgagctgcatattctgcaacgtgaaggggctaaaaaagattactcctccctcgaacagcagcaggcggcagagtattttgcggcgatgtccgagcaggaaaaagacacgttaaccgccaatattattgccggcctgccgggtgccgaagaaggctacaccctggagcagttccgcgcgcgtctggcgacttacgacggcatcgacaaggcgggcctgcgtgacaacatggcgcacttcctgcgtgccatcgtgccggttgccgagcagcacggcctgcgccttgccgttcacccggacgatcccccgcgtccgatcctcggcctgccgcgcatcgtctccaccctcgaagatatgcagtggctgaaagacaccgtcgacagcgtgcacaacggcttcactttctgtaccggttcatacggcgtccgtgaggataacgacctggtgaagatgtttactgccttcgccgaccgcgttcactttattcacctgcgtgccaccacgcgcgaggcgacgccgggcagtttccacgaggccgaccatctggacggtgatgtggatatggtggcggttattaaagcgatactgaccgaagagcagcgccgccaacgcactcaggatctacgccctattccgatgcgccccgatcacggtcatcagatgctggatgacctgaaaaagaaaactaacccgggctattcagccattggccgactgcgcgggctggccgaacttcgaggcgttgaacgcgcactgaagcagacgcttttttcttgatagccgctgagttgaatatttagccctgcccccgctttccccgtcacgacaaaggggaaagcgggggtgaatctgccacaaaaaattcccgccctctactgctccccctttactgctcccgcccaagattctgctctcgccatttggccggcgatacgccatgaacctgcttgaacgccttggaaaagtgaagctggttttcataacctaccgatattcccaccaccttgatggcggtatgttgattgcacaacaggctgaccgcgatgctcatacggaaattaagcaaatattccttggggccgatgccgtattggcttttaaacaggcggcagagatagctgcggttgatattgcaataagccgacaggctctcgatggtcagattttcatggtaacggttttcaatctgtttgatggccttacgcaggtgctgcgctttgtcgttatgctgctctgccataccctgctgcgtattgccaatcagtgcagaaaagaacaggtaacacaggcccagcaccttgaggcgatgcccatccccgtcggcaatgatctgccgcaggcagcgctcggcgtcagcgccttgttcaggccgattgggccgataaacgggaaactgtcgactcagcccgcactccgcaaaaatcttgctggccaccagcccatcgacctcaagccacatgtagtgccaggggcgacgttcatcggcacagtaggtggtcacgtcgtgcgggtgaatcaaaaaaccttctcccgccgcaacgctaaaggatccgtattcactgtgcagaacgccgacaccacttatcacataatgaaatagatagtgctgacgcacagcgggtccaaatcggtgtcccttatcgcaatcttcctctccgtactgatagagattcaactcgatattgtctgtgcgattcagcgtaaaggtcttatgcatcagtggacgtccgtgattttcttgcctgttctagcagtgtagtcgaggcaaattatggcgtccgccatcaaatcaagatctcgctcacattattcgaggtgagtcatttttcaccataacaaggtcacattcatccatatctcgcgccgccattgcagcgtagtttcagcaaatcgaaaacagcagcagtggagagattaaatgataaaagtcactttcatgggcgcgggcagcaccatcttcgccaaaaacgtgttgggcgatattatggcgaccccggcattaaaagaggtggatattgcgttatatgatattgacggtgcgcgcctcagcgaatcgttggccatgttgaacaatatcaaccgtaataccaacgccggacgggcgaaaatcaccccctacctcggcgtagagaatcgcctcgcggcactcaagaatgccgactacgtggtgaatgccattcaggtcggtggctatgacccttgcaccatcaccgatttcgccatcgccaaaaaatacggcctacagcaaaccatcgccgataccttgggaattggcggtatcttccgtgccctgcgcacgctgccggtgatgtttgattttgcacgggatatcgaggcggtatgccctgacgcctggctgctgaactataccaatcccatggcgtctttgaccggtgccatgctgcgtcataccggcgtgaaaaccgtcgggctatgccacagcgttcaggtctgcgcgcaaacgctgttacaaagcgtggggatgccgaccgatggcgtacagttccatatcgcaggcattaaccatatggcatggctgctggatattcgccgccacggtgaggacctttacccagagatcaagcgtcgagccaacgccttagagggcaagcacgatgacatggtgcgccacgaaatcatgaagacctttggctactatgtcactgaatcctcagaacataacgctgaatacatgccctactggattaagcgtcactatccacaactcattgagcgcttcaatattccgctcgatgaatatcctcgccgctgcattgagcagattgaaaagtggcagcagcagaaactggcgctaacccacgatgccaacctgacgcaccagcgcagccatgaatatgcctcttacatcattgaggcgattgaaaccgacaaaccttataagattggcggtaacgtgctgaataccggcctgataaccaacctgcccgccgaggcctgtgtcgaggtcccttgcctggtagacggtcagggagtcagcccttgctacgtcggtaatttgccggagcagctcgccgcgctaaaccgcaccaatatcaatacccagttactgaccattgaagcagcggtcagccgcaaacgtgaggctatttaccacgcggcgctgctcgacccgcatacctctgccgagctgtctatcgatgacattcgtaagctttgcgacgagcttatcgacgcgcacggcacatggctccctgcctatcattaatcattaaatcaagctgttactgcatcaaaacccataaggcgcaggcccgttctgcgccgtcaaaaatggacggtggaccatgttctatttaaaaaacaaaaatttttggatcttcggtgccttctgttttttctatttctttatcattggcgcggtgatgcctttcttccccatttggctgcatgacgtcaatcatctcgaccagcgacaaactggcgtagtcttcgccagcatggcactgtttgccctgatatttcagccggtatttggcttcgtcactgacaagtttggactgaagaaacatctgctttggatgattatctttctgctgctgtttctggccccactgtttatctatgtgttctcgccgttactgcaaagcaacttctttttaggcgcgttgctgtgcgggatttatctgggcgtggtgtgcagcggtgggtcaccggccattgaagcctacatcgaaaaagtcagccgccgcagccagtttgagtatggccgcgctcgtctgtttggctgcattggctgggccatctgcgcctctatcgtcggctatatgttcaccatcaacaatcagtttgctttttggctggcatcaagctttgcgctcgccatggcgggcttgctctatcttttcaaaccggaaaaaggcaatacgctaaaagtggcggacgggctggcgttgaaccataacccggtgcagctaaaaacggcgcttggcctgctgaaaatgcgcaaattttggtatctggtgatgtatatcgttggcgttgcctgcgtgtacgacgtctacgatcagcagttcgccaacttctttacctctttcttccgcgacaggcacgccggtacccaggcgtttggatatgtgaccacgctaggcgagtttctcaatgctttcatcatgttctttgcgccgcttatcatcaatcgcattggcggcaagaatgcgctgctgattgccggactgattatgtcggtgcggattataggctcgtcgcaggcggagtcggttacggcggtgattttactcaagacgctgcatatgtttgaagtgccgttcctgctggtgggcattttcaaatacatcaccacccaatttaacgtcaatctttccgcctccatttatctgtggggttactgcttcttcaagcagctatcggcgataggtatgtcttatgcggcaggtctgatgtacgtcaactatggtttcaaaacttcttatctaatgctgggatgcattgcgctgctgttcaccctcatttcggcctttgttctgagcggtaaagcggcgattgtcgaggaagaaggcctgcacgcgcctgctccgcggcctgctgcgcaatgaacccctggcccactcaccccttgaggagacgctcttgcaggaaacgatggggttgcgcagaactgacgggcggggttgttctgcgcggcccctttaacagggcttcaaccttaatttattgaatataataaacttaaattactcaccccaggttctttcgagcacgctaatccaatttttatggcagattttctccagcagcgaagtgttatatcccgccttgcgcagcgcggcttcgaacttgcgcaggccgcgcacatcgaccatgtccggtgtcagtgttacgccgtcgaagtctgagccaaagcccactttgtcttcaccgagtttctcgaccaggtaatcgacgtggcgcaccatatcgagcaccgaggcgtacggggatttttgcccgtcttcgcgcaggaatgacatgccaaagttcacgccgacaaagccgccgctctctttaatcgcctcgagctgtttgtcggtcagattgcgtgactgagcgctgagtgcatgggcattagagtggctggccaccagcggtgcgtcgctgtgttttgccacctgccagaaacctttttcatccagatgcgacaggtcaaccatgatgcgtttctgattacaggccttgaccagcttaatccccagctcggtgagtcccggtccgaggtctggcgatgacggaaatttgaacggcacgccgtgcccaaagatgttcggacggctccagactgggccaatcgaacgcagccccatcgcgtagaacacgtccagcagatagaggtcagggtcaatcgcctcggcgccttcaatatgcataaccacagctaatgattgattttgtatcgactcacggatttctttcgcgctgcggcaaatttttaccgcgcccgcggaggctttttcgatacgcagcaaaaacgccatcatgccaattgtgacgtcacgcgcagaattgaaatctggcgtcggagaaaaatcgggatgcttattagtaccttccaacaggaaactagtatcaattcctgaacccggcacgatacttgcttcttccgttaagtcaggcagcttcggtgagggaacataggccgcgaacaggcctccggcaaagcctgcctcacggcagcgtgccaggtccatttgcccgcaggcgggaccttccagaaacgcgtgttgcggattttggcgatgatttaaccaaagttgcagtaaaacgtcgttatgtccgtcaaataccggtaccgggccttcagttgcgctgactatgttattcataaaaaaggtctacccttggttaagcacgacaggaatgattcagcctcgctcttaaaaggtgcaattcatttctgaatcgcaccacgcatgagcaaaatttcacattacattttcttgtgaaaacggcgcatcgtggcgcggctgcgatgccgtccattagagacaaagcgcagcggacaagtcaagggcaggacctaataaaattaaattttaagtttaaatatcaacacgatgggagtcctcatggtcacaaggcgtagttttattaccggtttcgcagcaatgcctgttttatcttacctcagcctcgataatgtcttcgcagccacgcccaaaaacatcctggtgatggcgcttcagctcgatattattaccagccttgacccgcatgaagccttcgaatccgtcggtgaagaagtcactggcaacctgtatcagcagttggttaaacctaaacttaccgcagcgaacgaaattgaaggcgacctggcgctctcctggaccgcctctgacgacaaaaaaaccttcaccttcaagatggacccgaacgcaaaattcgccgacggcacgccgctcaccgccgaagatgccgccttctctcttcagcgcgtggtgaaactcgataaaagcccggcctacatcatcaaccagtttggctataccaaagacaacgtcgagcagtttatcagcgcaccagacaaacaaacgttggttatcaaaactgccgaaccggcctctgaatccttcctgctctactgtctgtcggccaacgtgggttccgtggtacagaagtcagcctgccttgccaaccagaaaggggatgacctcggcaacgcgtggctgaaaaccaacagcgccggttcgggtgccttcaagctgcgtacctggaaagtcagtgaaacggtgatcctcgagagcaacaaaaataatcctcacgccgggaaaatcgaacgggtcattatccgccacatcgttgacccgtccgcgcagctgttgatgctgcaaaaaggcgatgtcgatatcgcgcgcaacctgaccaccgaacagctgcgaccgctgcaaaacgacaagaacttcacgctggtgagtaaaggtatcgccggtaccctgatggtctccgccaacgtcgccaaccctaaccttgccaaacctcaggtctggcaggcgataaaatgggcgttggattacgaaagtattcagaaaaacatcatcccgctgacccacaaaattcaccagagcttcctgccggagggtttccctgccgcggtgaacaccatcatgtacaaacgtgatgtcaccaaagccaaggcgctgctggccgaggccggtttcccgaacggtttcgaggtcacgctcgaccactattcagcctcgccttccgccgatattgcccaggcgattcagtccaacctaggcgaaatcggcatcaaggtcaccctgctggccgccgagagccgtcaggtgctgaccaagatgcgtgcccgtcaacagcagctggcactgacccagtggggcgctgactattttgatccgaactctaacgccgaggctttttgcagcaaccctgacaacaccaccaacgccaagagccggacgctggcatggcgctgtagctggcaggacaaggccatttctgatctcagcacccaggcgctgcacgagtcggatccggccacccgcatcaagctttatgagcagctacaaacccagcacatggaaaacagcccgttcatgataatgttccagccgacgttaaccgccgcctgccgtcatgatattagcggcgtggtattaacggtcatgagcaccagtccctacgagaaggttgttaaagcgtgagcaagagactcaacagttttctgagtacctgcatcagcgtttgtcttactttgtttggcctgtcggtgattaccttctttataggcagggtgatgccgacagatccggtgctggctgcggttggcgataacgcaccggaatcggttgtcgaacgtgtacgtcatgaaatggggctggatcagcccctttggatgcagttcctccactatctcgttcagttggctcacggtgaccttggtcgctctgcggtaacctcgaatctggtgaccagcgacattgcgcgctacttcccgctacgctcgagcttgccaccgcggcgattattatcgccgcggtcatcggcattccgcttggcgtatgggcggcaacgcgtcagggaagctggattgatcagaccattcgcgtcgtctgtctggcgggacactccctgccggtattcgtactcgcgctgctcagcctgctgattttctactcggtgctcggcattgcgccaggccccggccgtcaggacatcatttatcaggacatgatcccgcaggtgaccggtttacttacggtcgattccctgctggcgggcgacaccggcgcattctgggacgcactggcgcacatggtgcagccggtgctgattctggcctatttcagcatggcctacatcacccgcatgacccggacctttatgctcaatgcgcttagcggtgaatacgttatcaccgcgcgcgccaagggactctcggcaagccgcgttatctggaaacacgccttcccgacggtgggcgtgcagctgattaccgtcctggcgctgacctatgccggtctgctcgaaggcgcggtggtgaccgaaaatgtcttctcgtggccgggcctcggacagtatctcaccgtctcgctgatgaacgccgacatgaacccggtcatcggttccacgttgctgattggcgcgatttacgtgctgctcaatctgcttgccgaccttctctatcgacttctggatcctcgcgtaaaatgacccgcttaatttcacgaacggggtcacgggcatggctgctcgatgagacccctaaaacacgtactcaggccgtttggggaagacgctatcgtatctggcttggcctgtgctccaacccgctggcgctgattggcctggtgactgtactgttggtgctggctatttcgctctgcgcaccgctgctgacgcactatcatccgggcgaccaggatctcgccaaccgtctcgccaaaccttctgcactgcacctgttgggcaccgacgaactggggcgcgatacctatagccgcatcctctatggcggacgcatcacgctcggcatggtgattgtggtggtcgccatcgtcgccccactcggtctgctgattggctgtgtggccggctatgctggtgggctggttgaccgcatcctgatgcgtatcaccgacgtgtttctggccttcccgcgcctgattttagcgctggcgttcgtcgcggcgctcaaaccgggcatcgagagcgcaattctcgccatcgccctcaccgcctggccgccttacgctcgactggcccgcgccgaaaccatgcaggtacgcggcaccgactatatcgccgcctgccgtctgaccggggcaacgcctgcgcgcatcgtgatgcgccatatcatgccgctgtgtgtgccaagcctggtggttcgcgtcacgctggacatgagctcgattatcatcaccgccgccagcctcggctttctgggcatgggcgcacagccgccgtcgccggaatggggcgcgatgattgcaaccgcacgacgtttcctgttcagcgaatggtgggttccgctcattcccgcaatcgctatttttgtcacctcgctggcctttaattttctcggcgatggtttgcgtgacgtcctcgatcctaaggaacgctaatgctggtcgatatcaagaatttacatatcacgtttgaaacccgcagcggcagctttgacgccgtacgcggcgtttctctgtcgctgggcaaagaaaagctcggcatcgtgggcgagagcggctccggcaaatcgttgaccgcccgctgtctgatgaacctgctgccctccagcgccaaatgccgcgccgataccctctccttcgacggtatcgacctgcgtaacgccggtgaaaagcagatgcgacaaattcgcggcaagcgcgtcggctttattttacaggacccgaaatattctctgaatccggtgatgaccatcggcaaacaggtggccgaggcgtggcagacgcacaagggcggcagcaaacgtcaggcgatggaagcggctatcgacttgttggatcaggtgcgtatccgtgacccgcacaaggtggcagaacgctacgcgcacgaggtctcgggcgggatgggccagcgcgtcatgatagccatgatgctggcaccggacccggagctgatgattgccgacgagccgaccagcgcgctcgatgccacggttcaggccgaaatactgcgcctgctcgacgatttggtgtcgagccggggaatggggttgattctcatcagccacgacctgccgctggtgtccaaattctgcgatcgcgtggcggtaatgtatgccggtcgcatcgtcgaaacgttacaggcgggcgaactgcgccacgccaaacatccttacacccgtggcctgctggaatgcctgccttcgctgatgcatccgagagacagactgccgattttggttcgcgacgaggcgtggaagacagcatgattactttagaccaattgcgcatctcgttcggcgataccgaagtcgtaaaaggggtcagttttcacgtcgccaatggtgaaagctttggcattgtgggcgaaagcggctctggaaaatccactatcctacgcgcattggccgggctgaatcagcactggtccggctcgatggacatcggcggtgaagcccagaccgcaaagcgggcaaaacgcttttaccgcagggtacaaatggtgtttcaagacccctatggctcgctgcatccgcgtcaaaccattgaccgcatactggccgagccgctggtagtgcacggttttctgaacattgaaaaacgcattgccgatgcgctaagcgaagtggccctgccgcagagcgtgcgttttcgcttccctcaccagctttcgggcggtcagcgccagcgcgttgccattgcccgtgcgctgatttcggaaccccaggttctgttgctcgacgaacccacctccgccctcgacgtttcggtacaggccgaaattctgaacctgttgaccgatatcagagagcaaaaaaagctgacctatgtgatggtgacgcacaatttagccgtcgtaacgcatctttgcaccagaatcggagtcatgatcggtggtcaaatggtcgagcttgtgagtgcgaacgatttacgggcgggtaacgttacacatccgcacaccgccgagctcagaaagttgagtctgaatctcgaagagccggaaatcgactgaggcttaaccaaatatagattagccaaggataatggaatgacttcacgtgttaactggcaagccgcactcgatgcggcccaaaagatcacccaacgctggaaccagccgggagagcccggaggtgccatcacactttttgacagctcgacgctgcgcggtgaagccagcggcggtctggcgaatctgaccaccggtgagcagtttagcatcgacagcgtcgtgcgctatgcctcggtaaccaagcatatttttgctgcactggcccttttacgcagccatgccggattatcgaccgacgacccgctgggacaacatctgccccagcttaaaggcccgatggcaaaagtcaccctaggtcaggcgctggatatgaccggcggtttacccgacgtgcgcgaaaccctgtccctgctgggaatatcggtctataacgtcaccgaggctgatgcattaatcgactttctggccaccgacggcagccttaactttgccgcgggcactgagatttcttattcgaacaccggctaccgtttggtagaaaccattctgaaacagaaagggattttgttcgaagatctgctgcagcgccacattgctcaaccgctggatatcgcgttccacgcccctgaaagctggtttgatattgtgccaaatctggtgccgggttactggaaatcggcaaccggttggaaaaccgccgccgcaggtctgcatctctcggcgtccggcagcctgacgggcagtttgcgttcactgtcgagctggttgcaaagcctgcttaaagacagcggccctggcgcagggtgttaaaacacctgagtcagccgcgcttcctgaaagacggcacgccaaccgcctatggcttggggatcgcccatagcaaaatcggcgggcatcagttggtcggtcacggcgggtcacacgcgggctataaaacttatttcctgctgcatcccgagctgcaaatgggcgccgcgctggtgtccaaccgcgaagacaccgcctcgtttacggcgctgctcgaggtgatgtctgccctgcttgagaccccgcttcccgcgcgcagtacgtcgctaaaagacggcctgtatgccagcaaggccgagccttactggctgtcggtaaataacggcgtggccagctatctgggggccagcgagaatttgtatcaggccgaagatggcagcagcgtgtcgctttctgcgcatctgccgatgcgtttagagatgaacggagacgccatcgaaggcgaaatcggtctggcgcgacgctttttcgcgcccatcgaggccaatgattgtctgaacatgattcagggccgttggttccacccggaatcgaaagccgcttttgatatcgaaggcgacgagctgaagatggggattgggcctttgcgtgccagcggtaagctcgtgccggtcggtgaaggtcgactgctggtgaaaatgcctgacggtccgtgggaaaaatcgttctgcctgtacttccagggttatgacgtgcatcttatctcgaaccgcagccgggtattgattttccgccgcgacgagtgccgcatcagctgggaacctaccgcgtaaacctttgcgcccctcttcggggcgcaatttacacctcgtaagccgcactgtgaaaatcaatttcccactgcaacacctgcgcatacagctccgagagctgaattttctctcgctccggcatgttttcagcacagcaatccaactctatttttaaccagttggcctggctaataaaggtttcctctgcgtgcatcgccacccagtctttcacatcaggactctctatctcgttctgactcacccgcgcacaccaatggtaatacatccattcggcagcaaacattagcgtgaggatctcggcatagctgccggtctctgcggcgcgcagcataccctgactaaagcggtaaacctcaggcgagctgcgtctgtagccgtctaaactgatgtttcgcttagtcattacgcactcgaaataggccatttgctcgttggccaatgcatcaagcacgccaatcaaccaccgctgctgacgaatctcgggcgccttgatgaccgcatacgagaaaatcttgatcgcggttgccacaaaatcgccttcaaaaaccagatactggttaaatactctggcggttaaggcccctgctcaatatcagtcacaaaacggtgctgctgcatcccctgccagagttcctgattttctgccaacaggcgctcggtaaaacttgtccgttgcggcatgatttattccccagctcggcctgtgccacagccataaaatgcttaacccgttgcggttcgacctgattccaccatacgccgccgtatttcagggtactggcgacgataaccccctgtgtgcgctgcaaaatttggcagatattagccggtgtcacgccagaacccaccaacagcggcagcgaggtagccgcacttatctcgtcgatttcgtccagggtggcgctatcgccggtgcgttgtccggtcgcaatcaccgcatccgcctgaaagaaatcgacgtcgcgcgttaattcggtaatggtacggtcggccacaatcgcgtggctaccgtgcttcacgtggctgtctgcaaagactttgatcttttcggcccgcagctgcgaacgataacgcagggccttcgcggccgccccttcaataaaaccttcgttggcaatataggcgttggcccactggttaacgcgcacaaaatccgcaccgccggccagtgcggtagccagcgcaggaatcgccgcattggccagcacgttaataccaagcggacacccaaactccgttttaaccctgtcggtaatcaccgacataaaggctgcggtttcataaccaatatcttcaggttttgaaaaaggaatatccccgtgattctcaataatcaacccatgaaccccgcccgacaaataagcctgcgcatcgcttaatgcaatatccattatttgattaattgattttccgcgataatttggtgaaccgggaaatggctcacagtgaaccacgccaattattgctttgtttcttgaaaatatttcttgtatcgcactggttttttctgctgatatagatgccatgacttcactctcctaaaggaatatttcatgcaggtctttgtggtaggtaatattagcgttgacgaaacttttcttatcgatgaattaccggctaaaggtgcttcaatccacggcgtcaagacgcatcaagacctcggtggaaaaggcactaatcaggctattattctttcccgctgtggaataaaaaccacgcttatcgccgccgtcggcaatgacagccagggaaaatggtgccatgagaaaatagccagcgaaaatctggcattatttccctcctcacccagagactgtcgtaccgatacttcactggtattaaactgtgccgatggtgataacgccaatatcactaccgtcaccgctgccaatgttttatctctcgatgacattaatcaggcaatgtcattttccaactccggagatgtggtattacagcagggaaacttcagcgttgaaaaaaccgcagccgtatttacccttgcgcgaaaaaaaggattaactaccgtcttcaacccctcgccggtaaaacgggcctttgcgcaacttctgccgctgacggatatattggtcgtcaatcagcttgaggtgcggctgttaagcggcgaaaacgaaatcttgcctgccgccaaagcgctgcttaacaccggtgtttctcaggttattgttacgctgggcgccgagggcgcgctgttgctcaacgctcagggcctgcaacgcattgccgcatcgccggtaaaggttaccgataccaccggcgcaggcgataccttcctggccgtcatgcttgcttccacgctgcgcggtcaatcgccaatatccgcaaaggatatgcggcgtgccgcgaaagcttcggccatcaccatcggcagaataggcaccctcagcgcctttcctacccgacaagagctggccgagctgcttaattaaatcagcaaactccccgcaaacagtgggtagttattatttaaactgctgccgaaacttatcgacgttggccttggtgaccacggtagccggaacgttgattgtcttgggaaccgcttgaccggccacgactttgtttagcgctttgaccgcctcaacgcccatgtttaacgggtcctgttgcagcaccgccaccacgtaaccctgatcgattcccgaaatcgccttcgcggtaagatcccagccaaacacttttatctctttttgacgcccctgattttctacggcggcgatagccccagcaaggccggttcaccggtggcatagatggcggtcatattgggattgccggtgatcagattctccgcagcagtcagtgcgttgtcctgaatgttttgtccgtcaaccacgcccaccacgcttattccaccgtggccttgcagagtattcacaaagcctttttggcgatcgttttgaatcgctgaattcagtgcgccgacaatccaaccttggctttatcgcccatttctttcttcacgtaatcggtaaaaaaattacccaaaatctcaccgcctttaatattatccacgccgacctgggccttttgttgtccggcaggcaatacggcatcgatggcaataacggggatatttttgacggccgcctcggcgatagcgggcatgattccgttgacgtcaatcgcgtcgaccataattcctttcacccctgctgaatatagttctcaatggcatcattctgtgagacgggattattattcgcgttatacacgaccaattttgcaccggttttcttcgcctcatctgccgcacctttattcatttgattaaagaaaagcgcctgctggttaatttgcaccatggcataagtcggtgcctccttggccgataccgcacttgaaaataataaacccagggtcatgacggccaatactgaacgtgccgttttagtcgtcttagagacgctgcttttcttgccggtgtgggtcaacataatgacatccttaaaaatgcagagaagaaataaggcgtgagttcccaatggcattagcctgtcaggaaattttttgggcgggtcagatatcagaatgtaggcgaagaatacgaaaagcgacgttccaaacgacactgtttcgataaaacgatactgcgggtaaactggcgataacaattaaacgcgggcaaaaattgtcaagaacaatatttcaacggcgtgttttttcactgcggtccattagccgcagcacaagtaaaattcggtatcggcccgcagtttgtaatatgctgatgctgatatcaggaatagtgtctatgagcctgttaacacaggcccttccgccgggaaagcagagataacatatggccaataaacgggtagtattatctgacgtagcgcagatggcgggactgtcaaaagccaccgtctcacgctacctcaacaacagcattgtgctgccgcagcagacggtacagcgcatcgaaaacgccattaacacgctgggttatcgtgccaacagcctcgccggcgtttaagcatgggcggtagcgaaaccatcggtctggtgctgccggatattgccaacccttcttcgccgaacttgccgacgcggcagaagaggcggcgtccgaatataaatacagcctggtgctgtgcgtcacccgtaataatctggaaaaagagtgccagtttattcgctggctagacacccgacaggtcgacggcctgctgtttaccaccaaccgcccgataacggtcaactgtataccgaactcaaggaccagcgtaacgtggtactgattgacgaagacgtgcccggctgcgaggtgccaaaggtgttttcagacaacgttcatggcggtgaactggcgacacaggcgcttatcgatgccgggcatcgccggatagcgtttgtcgggggtcccgatgagctaatgagcgtacgtgagcgccatcaggctatcgccaggcgctggcaaaaggtgctatcgcctacgaccctgcgctcgtgctgtacggtgactacgaccgggtgtttggtcggcaggcgcttgataccctgcttgccctcccgacgccgccaagtgccatcttcgctgccagcgattatctggcgctggggctgctcgacggggtgcgagccagagggcttagcgtgccgggttcactgtctttggtaggtttcgatgacgcgatttactcggatctaattactccgcggctctctaccatccgccagtcggcgcgggagctgggccgtacagcggtcgaagcgctgatacagcgtttaaacgacgacgcaagcccgaatacggtgtcgagaattccggttgcatggatagcccgtgactccgtgtccgcttacccgccgaaaccttgattttgcgccccaatctgggcctttgcccctttttagagcaaaaagtccttttcgggcagagtaaaaatggtggccctttgccggaggataattgaattaagccgccgtgatgaatttcattaaaataataatttatatataaatcataaaattaacacaaaaaagcccctttaccttactcacatcgcttaacttttactcaactcttggcacggttagtgcaaatttattttcggcgactcagatatccatactcaattttttgttgatcggttgagcgggaaaacggattcgccgttatttttgtcatttgggtaaaccggtttacaaggagaggaaaatcggaaatgaccaataacggcgcatccaggacttagcctgatgaagacacaggctgccgcccgccgtccctttgtgatggagcagatttatgtccagagacctgtcaggcccgccacgggtggagatgattaacatcaccaaaacctacggttcaatccgctctctgcgcggcgttaatctcagtctggctccgggagaagtgctcgggctggtcggcgataatggcgcgggcaaatcaaccttaaccaaaatactggccggtgccgtggtgccgagcagcggcaaactgcgcatcgacggcgaagaggtcagctttgctaaccccgccgacgccaggcgctgtcacatcgagatggtctatcaggacctgtcgctctgcgatacggtcaacgtagcgggtaacctgtttatgggcgggaaccgcagactcgcctgctgggcatcccgtttcttgatgaaaaaagatgcaccaacaggcgcatgagatgctcaagggactggggatttccattcctgatacgcgcctgctggtgcgcaacctgtccggagggcaacggcaggcgatcgctatcgcacgcgccgccgccttcgagccgaaggtgttgattatggacgaaccgacggcggcactggcggtcgccgaggtggaagcggtgctcgaattggtgaaacgcgtaagcgcgcgcggcgtcagcgtgatcctaattacccaccgtttgcaggacctgttcctggtctgcgaccgtatcatggtgatgtatgaaggcaccaacgtggccgacaggaaaatcgcggacactagcctttcggacattgtgaatctgattgtcgggcaaaaatttgaagcacattcggcgcgtgaaatcgtccaccaatgagtcttctaaaaggtaaatccatgagcattgtgaatatgtccagtccacgactgattaaacattcgctgtcgcgccgaatactgcacaaccattccggcgtagtcagcatcgcggttttctttatcttttgctgcgcagcgttcaccttcgccaccgacgatttcatgagccactacaactggctgaacattctgcgccagagcgcccgctgctgattgtggcggcagcaatgacgctagtgattaccaccggcggtatcgatctctcggtgggttcgacgctggcgctggtcggtgcgctgtcggcgatagcgctaaataactggggatggccatggccggtggtgcttgttgccggtctggcgctcggtgcggtcatcggcgctatcaatggatatttcatagcctatgagggaattccggcatttatcgttacgctggcaacgctcgccgtctttcgcggcatcgcgctgctgctgacccagggatattcaatccctgttccagcaggcagtgactttacctggctgggccgcgcctgggtgctcggtctgccgcttccggccattctcggcgtactggcgctgttttttgggcacattttactgacgcacacccgatttggccgctatatcaccgccgtgggtgccaacgcagaagggttcgccgcgccggagtcaacacccgctcgataacgctgtgggtttacatgttgagcggcatgtcggcggcgctggccggaatgatcatcaccgcgcgcctcggcagcggctcgtctaatcaaggggaagggttcgagttacaggtcattgccgccgtggtgctcggcagcaccagtctgtttggcggattcggtaccatcattggcaccctactcggcgcgctgtcgattgcggttatccaaaatggcctaatcctctcgcacatgtcgccgttttatacccagattgctaccggtctgattatcctgctggccatctggctgaacacccgtatctttaatcccgcccgaacgagcaaaggatagtcctatgaattcaggttcacttttccgtcatgccaacccctatccgctcggcgtaaccagcggctatgtcagcaccgttctcggcccgatgccggtttgcgacctgggcgtgaccttgatgcacgaacatattttgctcgatgcctcagggaagtgggtaccgccgtgctgttgcagcgaacgccacatcgccgagatgccggttaaaatcgagaacctcggcgaactgtcgttaaatccgctcgctagccgcgataactgtcagctttttgacgtcgatctggcaattgaagaactgatgaaattcaaggctcagggcggtcaaagcgtgattgacccgaccaatatcggcatcggtcgtgacccgaaggcgctacagcgtatctcacgcctgaccgggttgaatattgtgatgggcaccgggttttatctcgaaccctcacacccggcctatgtcaaaacccattcgctggaaacgctcaccgatctgctaatctacgacgtcggcgggtttgacgacaagccggaagtgattgccggtctgataggcgagataggcgtctcgagtgcctttaccgccgatgagcaaaaatcgctgcgggcggccggtcgtgccaatgcggcaaccggtgtcccctcgaggtgcatctgcccggctgggagcgattggggcataaagtattggatattctggccgaagaaggtgcggacctgcatcacaccgtgctttgccacatgaacccgagctttgccgataaaaactatcagcgcaccctcgccgaacgcggcgcatttctcgaatacgatatgattggcatgaactatttttacgccgatgaaagcgcccagtcccctctgacgaggagaatgcgcgcgccattcgcgagcttatcgacgagggttttatccaacaggttttactctctcaagacgtgtttttaaaaacaatgctgacccgcttcggcggccacggctatggttatattctcaagcattttgttcccgcctgcgccgtcatggcgttaccggtgaacagctcgagcagttgctgatgggtaatccacagcgcgtttttagtcaacagtaggttcgctcacaccagggaaacctacgctttatgattgcaggaaaatgtatgcagacggacctctcggtcatcgaactgacgcaaaaactgctggccttcgacaccatcaacccgcccggcaacgagcaggaatgtatgctatggctcgcggagtacctgcgacagcatggctttgaagtagcaactcacgcctttggcgagagcagaatgaacctgattgcccatttaaacgctaaggataaaacgcctccgctggctttttccggtcatcttgataccgtgccgctgggcaatgccgcatggcagcagagtcctttcggcggtgatatcgttgatggaaaactctatggccgcggcagcagcgatatgaaggcggcgattgcggcgtttattgtcgcctgtcttgcacagcgagataacctccaggcgggcgtggtgttgctgctcaccggcggtgaggaaaccggctgcgatggcgcacgcgcgcttatcgactcaccagacatcaggcttccgcagcccgccgcggtgatcgtcggcgaatcgacggccaattacccggtcatcggccataaaggtgccttgtggctgcgctgcgaaacacacggcaaaacggcgcacggcgcaatgcccgagttgggcatcaacgcgatttatctggcgatggatgccgtcggtaaaatacgcggcttcgaaccgggcccgccgcatccgctgatgaaaaaaccgacgctaaacgtcggcgttatccgcggggggttaaatataaactccgtgccagaccgcgccagctttgacgttgacctacgtaccgaccctaccattgaccaccactacctcaccgaaaggttacaacgtcaccttagtgacgctgtcacaataactccgcttatcgacttgcctgccgtgctcaccgacggcctgcatccgtggatccagagcaccattgcgctgtgccagccctggcattctgagcccattacgccgcgtattgtgccttattttaccgatgcctcggtactgctggccgcgctcggcaatccgccctgcgtcattctgggccccggcgaaccggcgatggcgcatcagaccgatgaatattgcaaggtggagcgtttgctcgagagcgtagacatttaccagaccctgctggcggattttaatacaaggttaaataagtaacagtttggtaacaaaaaggattgcgcttaaaaaggatgtcaaaatgtctcttgttgaagattttcaatccctcttgctgatgcctaaatcgcctgaaggcctcatgctttaaggggtgacggcgatcacagttttgagttttttatccgtatcaatcccctgcctctttactaaaaccccatacaaaaaatgtcttttagttcacatttttagatcccgccacctgataacgtatcaaacggttcgcaatagcacaaaatgtataagcccaatgcccacaaggctttgcgggccatttttagggtttttagtggaaaaacagtgacaaataattaatttcgcagcgaaacgatctattcacccacgaaaagaagtgaattaacatccacgaaacatttaaaaataactcagtcacaattagggttttgtgaaccctttgcttcgatacctttttacatttgctcatttttttaaaactggaaccgatcatgaaacctagtcttctctctgtattttgcaccgctggcctgatgtttacggccacttctgctctggccgccgtgcatactgaactcgacaatgcgcaggcgcgccaggtgattagcagcgttaaagcgacgatcggtcaacagcacagcaccggctgtgtggcggtggttgacgccgacggcaagctgctggcgtttgagcgtctggataactctccggctggctgcgtagacgccgctatcggtaaagcgcgcacctcggcgctctaccacgctccttcattgaaatttatgcaacgtctgcagggtggcgaaacgacagtgctggctatcccgcacgccgttccgctcggcggcggctacccctgacgctgtctggtgaagttgtcggagccgtcggcgtgagtaccccaaaacaggatattgacaatcaggcgtcagaaaccgccgcaagcgttttgaaataacctctaacggaagacaatcatgatcaatctttcacgccgccgaatggtcttcggcactgccagcgttgttgcggtcggtctcggcagccagttgctgggcagcagtgtgttcgggactctggcgcacgccgcgccacctctggcatcagccattacgatgccagacaactttatgcagctttccaaaaagctgacggccgtcgacaacctcgaatctcatctgggtcaggcgctttacagctggttgcatcacgccgagctagacgctcagctagacgcgctggcgaccctgctcagcgcccacagcgacgtggtaggcgacccgctgcatcagcttctggcgcagcagcctgcggcgttaggtcaactttatcagcagctggtcaacggctggtatctgggcgtggtcggtcaaccgggcagccaggtatgtatcggttttgaaaatattgtgagttacgaactagtgaaagacagcttattacccccaagttacgcggtaggcgaaccgaacttctggatccacaaacctgacagcgaggcgccaacccatggctgattcattgaacgctgacgttatcgtcatcggagccggtattgccggttcactggccgcagagaaaatggccaaggctggtgtctccgtgctgatgctggattcaggtcctttcttcaagcgtgatgaagcggtagagctgttccgccagtctccgcttaagggtgacttcaccgaaccgtatccggcaaaaccttgggcgccacagcctaagttccagccaaaagataacaactaccttatccagaaaggtccggacgtgtatgcggcgcagtatctgcgcggcgtcggcggcaccacctggcactgggcgggtcaggccttccgcctgctgcctaacgacatgaaaatcaagaccctttatggcgtgggtcgcgactggcccatcggctacgaagatctcgaaccttactacatggaagccgagatccagatgggtgtctccggcgacgatgacctgggctcaccgcgctcacagccttatccgctgccaggtatcccgctgtcatacggttttgagcgcattaaagagcgcgttgcctcattgggctacgtggtcggtatcggtcctcaggcgcgtaacagtattccttacgacggtcgcccggcctgctgcggtaacaacaactgcatgcccgtctgccctatcgatgcccagtatcacggcggtatctctgcgcgcaaagcggtagaggccggtgtgcgcatcatcgccaacgcggtggtgtacaaaattgaggctgacgacagcggcaacatcgtggctatccattatctggataaagagaaacagacccacaaggtcaccggcaagcgtttcgttctgaccgccaacggtttggaaagtccaaaactgctgcttatctccaccagcgagaaatatccaaacggtatcgccaacagctccggcatggtgggtcgtaacctgatggaccacccgggcacgtcggtcgagttccttgccgacgagccggtatggtttggccgtggcccaatgcgtccgggcagtatcaacaacctgcgtgacggcgattggcgcggtgagcgctctgcgctgcgcgtcgacctggcaaacacctcaccggtgcgtacgctgaccgaacgtctggtgaaacagggttactatggcaaggcgctgaacgacaagctggcctatcaggcaccgcgttacgtgctgctgaactgcctgctggagatgctgccagagccggaaaaccgcgttgtgccgagcaaaaccgagaaagacgaatgggcattccacgtctcgaggtgtattacaagttccctgagtacgtcaacaaaggctatgaccagtcgatgattgacttcaagaagattgccgaagcgatgggcggaaccgaagtggtttacagcaaacgtggcgtttacaacaacaaccagcacatcactggcacgatgattatgggcagcgaccctaaagattcggtggttgacggaaactgccgcacgcatgatcacccgaacctgtttatcgccggtaccggcatcatgccttctgcctcaaccgttaactcgacgttaaccggtacggcgctggcgcttcgcatggctgactcggtgctgaaaagcctggcctgattcttctaagggactgcggtagcccaccgagggatatcgtatgaggatgtggaaatgaaaatgaaatatttgctggcggcattattgcctctggcggccgcgaccagcgcttttgcagacgatgcgtcaagctcggcagacatgattaaacgcggtgcctatctggcaaccgcggcagactgtaccgcctgccacacggcaccgaatgcggctaagaaccaacagtttggcggcggttatccgctggcatcgccgtttggtgtgatttatggcactaacatctcctccgataagcagtttggtatcggcaattggaccgacgacgagtttgtacgtgcggtgcgtgacggcgtgggtaaagacggacagcagctgtatccggcgatgccttacgactcattcaccaagatgaaacgtgatgacgtgttggcaatcaaggcctatttgatgtccttaccgggcgttcatgcggcaccggccaagactgacctctccttcccgttcaaccagcgctggggcatgacgttctggaaatggttcaactttgataagggcgagctgaagaacgatccgaccaagagcgatgactggaaccgtggccgttatctggtcgatgcgatggagcactgcggcacttgccacacgccacgtaacctgaccatgggcatggacaacagcaaagccttctcaggcggtgatctggggtcatgggtcgcgttcaacatcacgccagacaaaaatgcaggtatcggtaactggtcgcagcaagacctggtcacttacctgaagaccggtgatttagcaggcaaagcctcggcttctggcgcaatggctgaggcaattgaacacagcctgcagcacctgaccgacggcgacctgaacgcaattgccacctacattcgctccgttccggcgattgcagatgacaaacagactcagccgcgtgattcgttcggcaaaccggcaaccgacgtgttcgctgaccgtgctaacgcggttccgtttgacaaaaccgcgtcagcgctgttcaacagcaactgtgcggcctgtcacggccaatcgggtggcggtatcggtaagggcttccacgcttatccgtcgctgtttaaccacaccagcaccggtgcagcagacagccgcaacatggtttccgtgatcctcggcggcgttcagcgccacatggaccagggtgaagtcatgatgccttcatttgccaaccagctgaacgacgaacagattgcacaaatcagcaactacgtcagcaaccagttcggtaatccggcaggtgccaccgtcacggcgaaagaagtggcgaaaatgcgcaaagcggcagacctgacctatccaccgaagattgaagacggtactcagaaataattcaggaaaaaatcaggctatatccctgagaactctttgagaacccgacaaaaggccgaacagtgttcggccttttttattctccacaggcggccgttactcaccgaaacgagccaccagcgtggcattatcgatggcatgccctttaagccgctcgaacagctggtcataggttaagcctttcggcaactcgttcggcgctaaatccgtggcaatcagctgcacgatatagtgatgcgaaccggtgccgaccggtggacaaggccattatagtagccgtgtcccatggtattcctcccgccgacgaagcctttaccctcgcttaacgcatcctgagcaaagccggttgcggtggccggaataccgtaagtcaccagatgattgacccaagaccgtgattggcgtcgacgtcgcgaatcgtcagcgtgaagctttgggtccccttaggtgcgttctgccagctgaaggcaggagagaaattgtcgccgatacaggcgggattagccttgatgttgccggcaaactgctttgccaatacgccattatcggtaaaagcaggcgaactcagcgtaaacattggcacaggcgttgcgctagccatagacgtccatgcacagagtgccagtcctgccaccgttttatagaacgaaatcgatttagccatgtttgacatccttgcttgataaaaaagacacaagaacagtaaggatagcaaagcggtgctttctctcagttcaggaaagctttttaattgcaaagagatgtgaaaattcttgttataagcgttttcgttactgccctcctcattacctgtttaggcaataaaaaagcgtcctgttagcgctcagttccctgaacgctaacggacgccttttattcacaaacttgaaccgggccgccgttggcgcggtttatacccaaggtcaatgcagcttatatgccaagattttcagcccgcgattactcagacaatcaataagttagccttgatgcaatcggggggtgatgattttttgcactaaaagtgacgccgttgcacaacaatatagccattgagaataaagcaacgccccgtgtcagtctcagccattatcccagcacaattcccttcgccatcgtcacatggcgatcgcacatgtggtcaataacgtcggcatcatggcttaccagaatcatcgttaaattcccggccgccttcagttcattaagcagattgaggatttctgcctgcaccgacatgtccagcgccgaggtgggctcatcgagcaacagcagttttggcttgagcaacagcgcacgaacaatggccacacgctggcgctgaccgccggagagctggtgcggataacgatgaattaacgccggatccagcccaccaagcggaaaccttccgccactttttgctcaatatcctgctctttcagcagttttagcggctcactcagcgtgcgtaaaagtttgtgcttgggatgcagcgaagcatatgggtcctgaaacaccatctgtacctcgcgacgcaatacgccggtaaacggtttgcccggcgtcaggcggtggccgagcagcgtcatgtcgcccgtccactgcgtatttagcccggcaagcacccacagcagcgaggatttcccgcagccagacggtccgaccaacccgaaacactctccctgattgatggtcaggtcgacgtcatgaaccaccgtacgcacgtcataaccttgacggtgagaaacgctgagttgatgcagttgggcaataatttctctgctcatggctggccctcctccccgctgaggcgcgccaacagcgcgcggtccaacaccggcagcatttcgccgcgcgtggctttgctcgggcggcacgaccacagcgtatgagtataggggtgcgtcgcctgcgccagctggctcgaggcaagacggtcaacaatttgccctttgtacatcaccatcacctgttcggtatactgagaaacctgttgtaaatcatggctaatcagcacaagccccatattacgctcgtcaaccagacgctcaatcagtttcagcacctgctcgcgcatttcatagtccagcgccgaggtgggttcatcggccaccagccactgcggacgattgataagcgcaatggccagcatcacgcgctgccccataccgccggaaagctgatgcggataaagcttgctgagttgcgctggattaggcaggccaacggcgttgagcatgtcgaggcgctgttccttgcgctcactgcggctgaagcgcccgtgcaggcgcagcggttcttcaacctgtttgccgatagcctgcgccgggttgagcgcgtgtttcgggtcctgcatcaccatcgcaatgcgattgccgcgcagcggattccattcacgctccttcaggcgggttaaatcctgcccaccgagagtcagttggctggcctgcatctgacaagggcttggcagcaggccatcagcgcccgggcggtcatcgacttgcccgagccagactcgcccaccagcgctacacgttcctgacccacgctgaatgaaattgacttcaccagctcgataggctgaggaccgggaacgtaaacggtcaaatctttcgcgatcagcaggtttgaatctgcgcccgccgcttgcggtgtggttgaattaattgccatgacgggtatccatcttgtcgcgcaggccatcgcccagtaggttaaacgccagactggcgaacagaatggccccgccgggtgctgcagccacccaccactggtcaaagataactttactgccttcggcgaccatcgacccccactcggcggtcggcggctgaatgcccatcccgaggaagccaagaccggcggaggaaagaatgatcccgccgaggctcagcgcggcgcgaacgaccgcactcggcatgcagagcggcaaaatatggccaaacatcaggcgaaaaccgccaatcccctgcatacgcgcggcggcaagatagtcgctacgacgcagggcaagcgtctcggcgcgcgcctgacgggcaaacggcggccaactggtgaaggccagcgccaacgccccattcatcaaaccaggtcccaaaatcgccaccagcgccaacgccatcaccagactgggcaacgacagcacgatgtcggtgaagcgcattagaatacgttcaacccagccaccgagataaccggcgctgatgccaatcagtaaaccaaagggaatcgtcagcagcaaaatcagcgacaccagcagcagcgtcggcctcgcgccataaatcacccgcgacaagaggtcgcggccaaaaccgtcggtgccgagccaatgctgtgccgatggcggcatgagtcggatttcaatatgctgaatattcgggtcgaaaggggccagccagggtgcaaacagcgcggccagcagcaaaattaccgccagcacggtgcccacggaaagcgtggtcacacgacgcgcgcctcggccgggtgcgacgcgagccagcgccggttgttcaggagtcagtggagtcataaataggcttaccgggttcgcggatcgagtaaataggtcaacgcatcggccagcgcattgagcagcacaaagctgctgccaatcagcaacgtcgagcccaaaatggccggcatatcggcggcaaacagtgcggtggtcagatagcggccaacgcctggccaggcaaagaccgtttcagtcagcaccgcgccttcaagcatgctggcgtaggacaggctgagcacggtgataagcgtgccgaagacgttgggaaacacgtgacacagcaacacccggacgcgcccagcgcccttcgagcgtgcgaggatcacatactctttgttgatttcaccgagcatcgaggcgcgcagcagacgggttatccccgccatcgacagcaggcccagcaccgttaccggcagccacatgtggcggatagcgttgaagaacatgtcgcggtcgcccgacagccaagtatcaatcagcacaaagccggtgcgcggctccatggtatagagataggcgtcgtcgagcctgccagggccaccggcccagtgcagcacggcgtagaacagcagcagtccaagcagactgagccagaagataggcacagaatagccgagcagcgagacaagacgcacgatgttatcaagccagctgccgggtttatagaccgacagaagcgcaaggataatgccgaaaaatgcaccaaaaagaatggcgcaggtcgccagttcgatagtcgcagggaacgtatgcatcaggtcgctggaaaccggctgaccggtcatgctcgacatgcccatatcgccgtgagccagatgctcgaggtagcgccagaactggactggcatcggctggtcgagccccaaatccttgcgcacctgcgcgtaggtcgcttcgctggcgtgatcgccagcaatctgcatcgtcgggtcaaccggcgcaagatgtgacagcgcgaaggtaaaggccagcaggccaagcagggtcagcattaaagaaacaaggccgcctagcaggcggcctgaccaacgccaaccctgtcggaacagaccgacaggaggagtagtttgaatcattacttggtgaccttgctgtagaacaccatgtcaggattaatgccctgcacgtagcctttgatgttgtcgcgcacggcaatcaggctgcgcgcctgtaggccgataacaaacggtgagtctttttgtacggcaagctgcagctgacgataatccgctacacgtttagccttgtcgttttcggccgtcgcagcaagcgtctgcttgctcagctgtggaatactccagtttgcacgccacgccagcgtcttgctgccgttttccgggttgtaggcaaaggcagaggcgttagtgttagggtcgaagtagtcaggcccccacgaagacagcgtcgcgtcaaagtcgtgtgactgcactttcagtgaaatctgcgaactcacgcccggctccagcttaacgttgatgcctgcctgagcaaaactggcctgcaacgcctgagcaatatccagatacggcggctggttggtcacggcgatggtgaagcttacgtttttcagccccgccttatcaagaatcgccttggccttggcgggatcaaacttgtaagggttgtcattcaatgcgcccaaataaccgtccggaaggaacgcctgatgcacctggaactggcctttcagcagatccttggcgatatggtcgtagtcaaacaggtagcgagccgcttcccaaagtgccgggttagccaacgctggggaggctttagtattgaaatacaagaagtacagtgatgcatatggcacagccagcggcttaacgcccggcttaccctgcaggccagccatctgatccgcacccaggttgcgcgccatatcagcatcgccctgctcaatgagcagacgacgagctgccgcatcaggcacgtttttaatcaacacggtcgggatcttcggcgcgccttccggcgagcttgggtttgcctgcaacaccagcacctgatgtggaatataggtacgaattttgtaagggccgctgcctgcggaatggtcgctcaaccactggtggccgagatcgtcacccttggcgttttgctcaaccagtttagcgtcaataatcgaagaaaccggcgcagagagcagactcaacacaaagctcgggctgacgttttcagtccagctaattttcacgtgctgtgcgtctatcttggtcaggaaaccgtcgacatttttcgcgttccagcctagctgggtcaggatgaaggagggttcaagattcagcttcaccacgcgagacagtgagaaaaccacgtcgtcggcggttaatggattaccgctggcgaaggtcgctttcggatccagggtaaaggtcaggctcttgttgtcacttcccgcctgccatgaggtcgccagcgttggcttcaaatcgataggattagttgggtcagactgcaccagacgttgataaacgttggtgaatgcctgcacggtagtcagttcgaagccttgagccgggtcgaagctcgatgcatcatcaagagattgtgcaataaccaaagtgttggctggcgtcgccgcctgtacgctaaaagaggcagcaatggctgcaaaaagaactgaaggaattatttttttcattgattaacgctcttttaagttagcgaagttgctaatgattttgggagtgtatggcagttatgaagcgacaataaagtcatttgaggtctatggttattcaaattttgcataacgtgatgagaatggttatatgtcgagcaaaacgggcataatagccgcaaaaagcctgtgtcatcagggctcaggcaatacaaagcgttcatctgcctaaccccacctcaagcaatatggcttatttgcaggaggtgggcacgggatggccaaagagagttttgcggtttttaagaaaggtttttagggaacgctgtgactgacccgaaccgaagcctttttgccggcggttcaaaggcattgacgccgcaggtcgtcgtcgcggtgagcacctcgggttctgctctcagcaaggtatcggcgggcaccggcgcaggggcgaggttaaccttccccatacccagattattaattccgtcctccccgttagcaagacgaggctctccggcgttgctcatcaacgtattcatacgcgcgtcctgccccttttcatccctcagctgtcgatttaattctatcaaaagcttagatttcaacttctcgcgttcccgaggcggcaaccgtctgaacacctggtccaggctgccccagtctgtcaccttaatttgtgggacatccgcattggcatcaagccccagcgtttcaggattcagactgtgctgagagtgatcaggatagcggagaataggcaatgggttgtcgattgagcgcctgtcgaccagcctggtttcagcgcgaacgctggcgcgtccagtttgcatgcccgccgccaactcggggataacaggttgagctgtccggggctggcgattgtcacagttatttcttaatctactgatcatcgcggtcaatgactgtgagttaaccttacagcggtgggaaaactgcaccttgcttatccccaacgcggtcaacctttgctcgttattcacccaggcaagcttgctattaatcagcttatttctgcaatccagtctcagaatgatggcatccatcacttcctgctgttcctgcaggcgtatttcacgcaataaatgcgactcgtgagtgttaggggcattatttggctgccgatacacaaggctcatccgtgatgaaagggtgccaataaggaccccagacaggcgttcaaactgccagacggtcaatccggcgcccagcagactctgtttatttttctcccaggccagcgcggtctctgacggcttacccctgcatttttctttgagaattatgccttctgcaagactctcctgcgtcggtgtaaggtcttttctggcctggtgttcccggccaacactcaagctaagtgcctttaaagtgatcccacagaaataggcaaaacttgtctgcaggatctcttctttcttaaatgatggctgattatccagccaggcacaggcacttttagcggatgagtcccggcagccggttttaacggctatgctgttaagcaactttcgttgcgtttctgtcagtgaccgggtgtgctcccgctctttttgtatcttaatgaacaggtgtcgggcattcactttacaggcgttagcgaaggcttcctgcccgatgttcatctctgacatcagccgctgattatcaacccaggcgtaagccgccagcgcaggacttctcaggcatgaagtcgccttaataattttgtcgatctgctcttgctgatgtggcgtgaaaccaggctcttttgacgatggcacataatcaagcatgttcaagtcagtattgatagcatgggtcttcacaccacagcgatggcaaaataccctattcgatactccaagctgcgtgaacaactttttatttgcgtaccaaacctcggaagccaggtcagcgatcccttcacacccggcggttttaatgagttcatctacttgagccttaatattgctattaagccgattccaacccctttttttttcagaaataaaagagaccagtgaataagggtcaatgtcgcacctgctggcaaataatcgcacctctatattattatctaacaactgggctttatttttctcccaggcaccctcgattagattcaggttccccctgcatcctgtggcgtcaataatactgtcgataaggctctgttgttcctctgagagtgggaattccatcagctgtgacttaatgttcagttgggagatattggcgttaagtgtcttcttgtttatcccactaagttctgccagcgaaattctcgatatacataattcctcaaattttttctgattaagcaaatagacacgcgctgtcttaataccactctttctgcatcctgactgtttaatgagggtatttacaaaattgatttgctcatcaccgagccttagctttccagaggaaagcaaaccgtcaggcccctgtgaactggtgaccccagtactttggctgacgcggataatattgtttaaaaatggctgaggatcgggccttggctgaggccttaacgatgaagaagtgattgatgtgccggggttcggtaatattgaaaaatcgctcattgggcttcatccagcacgttatgaactgactcgagtcgatgcctttttaccggcggttcaaaggcattgacgccgtagatagtcgtcgcggtgagcacctcgggttccgtcttgggctgacgcccggcggcaagctcttcctgcctggccttttctatgccaaacagaggattgtagtggtcaccgtaatcaacaaagtattctccacccaccgcaatatcgcgcgtagtgatgtaggctatcagccgcgaattaacctgaacggcggccacgttgttttcgtctaactgcggctgagcgggcaatttaccggtgttaatattgcgcaggatattgccgctttgaaaggcatcaatgttcaatttctccgttcgggtttgccaactgtgagaatggccgttgaccgtccctatttgccgcaccgttttctgtgaagcggcgctatcgagcagtaaacccgcgtaaaatcccagcaccgtattggcgggcaccggcgcagggccggggttaaacactcccatacccagattaataatttcatccccagtggccgcaagatgatgcgatccggcgttgctcatcagcctattcatacgcgcgctctgccccttttcatccatcagctgtcggtgtaattctttcaaaagttctgctttcaacgtctcgcgtttccgaacgggtaagcccgtaaacacctgccacatgctgccccaatgtgtcaccttgatttgtgtaacttcggcatgcgcatcaagccccagcgtttcaagcgtcagactatgctgaggattatcaggatggcgaagaataggcagggagttgtcaattgacggtctgtcgaccagcctagcttcagcacgaacggtggcgcgtaattcgttacccaaggcatcgagagtaatttccatgatccccaggttggcggcgctttcagtttttataatcaacggcggcgctggcggtatagattgagaggctgggggcgggtgattaccattatttcttattaacctactgactgaagaggtcaatgactgtgagttaatcttgcagcggcgggagaactgcgctttgcttatccccagcgcagtgaacctttgctcattattcacccaggcaagcttgctgttaatcagcttatttttgcaatccagtctcagaatgatggcatccatcacttcctgctgttcctgcagacgtttttcacgcaataaacgcgactcgggagtgtcagggtctttatttcgctgccgatacataggggtaatccgtgatgaaagggtgccgataaggacgccagacaggcgttcaaactgccagacggtcaatccggcgtccagcaggctctgtttatttttctcccaggccagcgcggtctctgacggcttacccctgcatttttctttgagaattatgccttctgcaaaactctcctgcgtcggtgaagggttctttctggcctgtcgttcccgggcaatgctccagcccagtgtctttaaattgatcctacagaaatcggcaaaacttgcctgtgaaatgccttctttctttaggaattgctgattatccagccaggcacaggcacttttagcggatgagtcctggcaatcggttgtaacggctatgctgttaagcaacttttcttgcgtttctgtcagtggtcgggtgcgctctcgctctttttgtatcttaatgaacaggtgtcgggcattcactttacaggcgttagcgaaggcttcctgcccgatattcatctctgacatcaaccgctgattatcaacccaggcgtaagccgccagcgcagggcttctcaggcataatgtcgccttaataattttgtcgatctgctcttgctgttgtggcgtgaaatcaggctcttttgacggcggcacataatcaagcatattcaggtcggtattgatagcaatggtcttcacacccgtgcgaaagcaaaataccttattagaaaccctaagctttttaaacagcgctttattttcataccaaacttcggaagccaggtcagcgatccctttacacccggcggttttaattaatttctctaactgatccctagtgttttcaggaagccgctcccagtccctttttttttcagaaataaaacacatcagtgaatgagggttgacgcggcacctgctggcaaataatcgcagatcaattttattttttaacaacagatctttattattctcccaggcagcggcggtgagagttaaattacccctgcccccagtggcgtcaatgatcctgtcgataaggctctgctgttcatttgagaatgggaattccatcagccgtgaatcaatggcaagttgagaaatattagcgtaaagcgtcttcttttttaccccactaagttctgccagcgaacttctcgagatacgtaattcctcaagtttttgctgattatccaaccagacgcgcgcaaccttgattgcgcttttgttacatcctgattgtttaatgaggttatttacaaaactgatttggtcattaccgaactttcgctttccagaggaaagccaaccgtcatgcccctgtgaactggtgacctcagtactttggctaacgcgggtaatattgtttaaaaatgattgtggatcgggcctcgacagtggcattaaagatgaagaaatgattgatgtgccggggttcgataatattgaaaaatcgctcatggcgtttattcccagattaattaaagacgtccggcggcgagctgtatctgcctggccttttcgatgccaaacagagggttgtaatggacaccataatcaacgaagtattcttcacccgccgcaatatcacgcgtagtgatgtaggctataagccgcgaattcacctgaacggcggcgacattgttttcggccagcggcggctccccgggcaatctaccggtgttgatattgcgcaagatattgccgccctgaaaggcatcaatgctcaattctgtcgctcctgtttgacgcacccttttctgtgaagtagcactatcgagcagtaaacccgcgtaaaatcccaataccgtattgatgggcaccggtgctggaccggggttaaccacccccgtatccagattaataattccgtcctccccgttagcaagacgatgctctccggcattgctcatcagcgtactcataggcttgctctgccctctttcatccaacagctgtcgatgtaattctatgaaaagtctagatttcaatttcaggcgtcccagaatgggtaaccgtgcaaacacttgctccatgctaccccaatgggtcaccctgatttgtgagacattggcattcacatctaggcccagcgtttcaagcgtcaaactgtgctgaggattatcagggtggcgaaggataggcagtgagttgttaattgagggcctgtcgacccgcccgagttgagcgcgaacggcggcgagtcccgtttttatgcccgtcggcggcactgggggaagatattgagcggaccggggtgggcaactgccattgttttttcttaatcgactgaccgaggaggtcaatgactgtggattaatattgcagcggcgggaaaattgcactttgcttatctttagatccgctaaattttgttggttttctatccaggcaagcgtgcttttgttgaggttttttctgcaattcgagctcagaatgatggcatccatcacttgctgctgttcctgcaggcgtttttcatgcagtaaacgccactgcggggttttctggcctttctttcgcggcctataaacacagctaatccgtgatgaaatggtgccggaacagaccttactggcatattcaaattgccaggctgtcaatccggcgtcgagcagactttttttatttttatcccaggcctgggccgtctctaacggcttacctccagagttctcagcgagtattatttcttctgtaactcttagctgcgccgaggtaggaatgactctgtcgcgtctttcacgggcaatcctccagccaaatgtgtctaaattgatcccacagaattcggcaaaatttatcggccaaatatcttctttaataatagattgctcattatccagccaggcgcaggcacttttagtagaggaatgccagcagcgggttttaacggcaatacggttcagcagcgcgtgttgcgtttctgtcaatgctcgggtgcgtgcccgctctttttgtattttaatgaacaggtctgtggcattgactctactggcgttagcgaaggcttcctgccgaatgttcatctcggacatcagctgcagatttttaacccaggcatttgccgccagcaccggattgctcaggcaagaagtcgcctcaataatcttgtcgacctgtgctcgctgttgcggcgtgaaatcaggttcttttgacggcggtacataattaagcatgctcaggtcggtattaatagcaagcgtcttcacaccacagcgaaagcaaaataccatattcgataccccaagttgttttaaggtctttttattttcataccacacctcggaagccaagctagggacgcctttacacccggcagtattaatgagtttatctacctgttgcctgatattgctatcaagccgcttccagcacctttttttttgagaaatataacacaccagtgacagagggttaacgtcgcacctgctggcaaataatttcacgtctatattattatttaacaactgggttttatttttctcccatgcaacggaggtgagagcccggttcctcctgcatcctgtggcgtcactgatcctggtgatcatgctctgttgttcatctgaaagtttgattttcgcgagctttgacagcacggcaagcttgccgatacgggcgaataattccttttgtggcacgctacaaagctctgccagagtacctcttgagatgtgtaacgcttcaagttcttgcttattatctagccagacgcgtgcggcctcaacgacgttattagcacatcctgattgttgaataaggttatttataaaggtggtttgttcattaccaatctttgactttctcgatgaaggcaagcaggcagggccctgtgaacaggtgacctccgtgctttgactgacgtgggtaatattgtttaaaaatgactgagggtcgggcctcgacattggcattgatgatgaagaaatgattgatgtgccggggttcggtaatattgaaaaatcgctcatggcatttatttccaaattaattaaatgatgacttacccattaatgaactttggttttatgcactcactgcgtttttccggtaatagctgagtgcttataaggcattattaacttacgatatcattatgtaatggcggttataccagcacaagatacaaagcaaccatttggcagataaaaagggtaatgctgggcgtgatgcaataggaaagtaaagtttatttaaataagcgaataatgaaagaataataaaaaccacagtgaattaacatcgcagtgaaggctatattagaaatcgtaggtcgcagaaaaattaaactcacgcgggtcggcctgtgtcatgcccctcccgtccccgctccgggtctgggtcatctccggatccgtcagcgtggcgctaacattgatgcgcgcccccagcaccggctcaccgaagaagttctactccacgctacggttaacccttacaccggaaaacatttataaaaaagcccgaaaaccttagggtatttcgggcgtttgcgggtgagcgaataagggttggatacacattatacccgatggcttatctaaatgagctgaatgtccgtggtgggatttgtcgagatacctaataacattcttacctgattaaccagttcgctcatgcagtcatcgttcatgccgtaggtcttcagctctttctccagcgcaaatagatattgcgcattggtcccgagtggaccgctggccttggcaatcagaggcgcaatcacctcataacgcgtatctgactcgaacgacggatgctgcgggttcatgataaacaccaacgccgtgacggttctcccgtcggccaactcaagctcacaccaggtcggacagtagctgccggtaagcatctcgcgcttccacagcagttcaagatcctcacgcagcttgtcttccggcagtctgaacgcaagacccgttgttttgccgccttcggtcagcgccagcatacggccgggctgagcatgagatccacgccctgcggtcaagcgcaggcaaaaggcacgatgataaccattgagcgttgcaggacatgactcttcggaatcgaaaataggattccacatcagcgagccgtagccgaagatccacaccgggcttttatccggtcttttcgccagagcacagtcaagcgaggccgagcgttgctctgcggtcaataagattgactcgtcaatgctgccgaatgctgttttgcagtctgcgttacgcagaaaatctcgggttaacaccatccaatacctccgctcattaaccttgccataactttattagtgtcttctccctcactgaggattgatcggggttgagaatttgtttagccatacataaataaggcccataggacaaaccttattcgtttattgcgctgcaatcaagaatgctgtcgatcacaaaacgaaaataaaccacaaaattgtaaaaaaatgagcatcagactgaaataatagcacccggcgctattttagcgtcgggtgctattggaaaaagatgagattaattggtgttttgcatctgttgggtaagcaacgtgcgcagtgggacgctacttttgataatcggggattttataacgatatagctaaaatacttatcgataccaatattcttatccagtaaagattctatcacttcctgatagtgttcaatgctgcgagtgatgaaacgcagcagatagtcatagccgccggttatcaggtggcattcaatcagttcgtcatattcgcggatgcagttttcaaaccgggagaactcttcacggcgatgcccctgtagcgtcacttcagtaaacaccgtcaccgagtcggtgattttaggcaggttgacgtgagcctcataaccggtgatataccctgcactttcgaggcgtttaacccgctggaggcaagggctaggcgacaaaccgacggcatccgcaaggttgacgttgctaatgcgcccatctttttgcagttgaaccagtatattgatgtcgatgcgatcaagttttaaaagccgttcatagcacctcactgtcttcttgagcgtcgaccgggaataaagagcagatttccctctgcacctgattcgaccctgaattcacataaaagccatgaataggatataccatgcttttgcagtgaaataccagcgccaggcgcagagagtttttgcctccgctttgtaataaaagtctatgaaatatctggagaaaaattaatccaaacggcccgttcctcgtgccagcgcgatatcaaagatgtgcattgcctcctccagctgagcatcggtggtcactaaaggcgccaggaagcgaatggtgttgcgatacagaccgcacttaatcagcaacagcccagcgtcgccggcacagctgagaattttctcggtcagcgccgcatccggtttgccggtatcgtaatcgacgatttcgaccgcctgcataaagcccacgccgcgcacctcaccgatgcaggcatacttctctgccagctggcgcaggcgcgtttcaagctgttggcccagcttcaccgaacgctcgagtaaacgctcgttttcgagcacgtctagcaccgccagtgccgccgcacaggacagcgcattaccgccgtaagtgcctcccaacccgcccggcgttggagaatccatgatttctgctttacccacgacgcccgaaataggcaagccgccgccgaggctcttcgccacggttatcaagtctggcgtgatgtcagaatgctggaagccaaacatctttccggtgcgaccaaagcctgtctgcacttcatcacagaccagcagaatgccgtgtttttgggtcaggtcacgcagtgcctgcataaaggccttaggcgctggcaagaatccaccatcgccctgaaccggctcaatcaggatagccgcgacgcgctctggcagagtttgcgtggcgaaaagggtatcgagggcctttagagagtcctcgggcgtaataccgtggaatgcattcggataaggaatacgatatatatcaccggggaaaggcccgaagttttgtttataaggctggctcattccggtcagcgcacagcctaataatgtgcgcccgtggaaagcgccgtcaaagacaataacgccggaacgattagtataagaacgcgcaattttaaccgcattttcaacggcctcagcgccggaagtaaagagtactgatttataatgctccccctttccaaccactttattcaaacgttttgccaattcaatatagggaggataggcgacgacctgaaaacaggcgtgggagacattttccagttgacgctgaacggccttaaccacttcaggatgattgtgtccaacgtttaatacgccgatgccgccaacaaaatcgaggtaacgacgaccgtcatcgctccacacttctgagcctttcgctttcgcgataaccaggctgtgtgcggttaccaccccacgcggaacgtgctgttggcgaagcgcaagccagtcagtatcatcttcaattacgggcagtgtatttaatacattgtgcatagcattacctcatccagttaattcgggcgctgtcagaatttgattcagtatctcaatctatgcgtttatttcgtgccgtaatggcggttcagaaaaaatatcatgcggtaattgggcgttaaaaggcagttgttttctttaatcgcaaatggttttttaattgcaaatttaagaagaaatcgacggatttattgggcagccgcccggcgagtcaggtattagctgacttaatacaacctctacaaaccacctcacccccaccggaatgatatcgtcattgaagtcatatcttggatgatgcagcggtgccagcggtttagggctgccgtcgccctgtccgagccacagataggcgccgggtttttcctgcaacataaacgaaaagtcttcagacgttagcgccggttttggcgcgacgctggcctgtagtccggcatttttcgccgcgcgtaacgccacctcggcttcggcttcgctattgattgtcgccggataatagcggtgatacttcacctcggcatcgaggccgtgggccgcaggaacatgttccgcaatacgacgcaggctggcttcgataatatcctgtgtacgaaggtcgaaactgcgtaccgtgccggtgatggtcgcctcggcggggatcatgttgtgcgagaatccaccgtgtacctgcgtgacggtcaataacgctgggtcggtcggatcgatgcagcgggaaacaacggtattaagctgaaccaccagttcgctggtcgccagcatagtatcaggagaaaggtgaggctgagccgcatgtccgccaccgccataaacgcgaatgtcgaaacgatcggccgccgccatgatagagccaggacgcgtctgtgccacgccgacgggcagttctggccaattatgtacggcgaaaacgctgtcacaggggaagcgggtaaacagtccgtcgtcaatcatcgctttcgcccccgcctgcccctcttcggccggttggaagataaagtttaccgtaccgtcaaaatcgcccgttttagacaatagccacgcggcgccgagcagcatggtggtgtggccgtcatggccgcaggcgtgcatgacgccttgatgggtgctgacatagtccggcgtcccctgttcgataatcggcaaggcgtccatatcggcacgcaggcctacgcttctcccgctgctgcccttgcgtaacaccccgactacgccggttttaccaacgccttcatgaacttcaagccccaactcacgcagaaactcggcaacgactttggccgtgcggtgttcattaaaacccaactcggggtgcgcatgcagatcgtggcgcaatgcaacgaggcgcggcaggatttctttaatcaaagacccattaattaaacaattatcgccattcacggcagtacggctcatattaatatcccttggttttgtcgatttcaccctgcatgggctgcccttgctcataacgctgaaggttggccaacagcgccgtgacggcagtttccggctgggtctgactggcgatatgcggcgttatccacacacccgggtgagaccacagtgcgtcctccaaaggtaacggctcagggtcggttacgtccagtactgccgcacgaagatggccgctgtcgagtgccgcgagcaggtcttctgccaccagctgttgcccgcgcccggtttgaatcagcgccgccccccttggcaagcgggcaaacagttcgccattaagcatgccgcgcgtctgcggcgtgagcggcaacagacaaaccataatatcgcagtgcgacagaaatgccggcagctgctcaacgcccgcccaaccggtcacgccctcaggcgtattgcccgaacggctccacccgtggcattcgaaaccaaaattcttcagcatattcagtgtcgcttgcccaagctcacccaaccccaacacgccaatgcgtcttttgtttgcactgaccaccggatgcgacttccacaggctctgtttctgttgttgcagatacagcggcaggtcacgatgcagcgccaacgcagccaaggtgacatattcgaccataccctgcgtgaggccaggctcaaccattcgcaccaccggtaaagatgcgggaagctgggtcaaatcaaactggtcgactcccgcaccaacggaaaacagaactttaagctgcggcatgcgctgcgcgatgttttctggcggcacccaggccaccagataatccacttcggcaaagatttccgggtcaccgtcgctaaaatcgaggctgttccattgcacaaaacgatattcgggggcgaggtcggcgagaagtttctgccagtgttcccccggaccggctcagacttatagagaatcgttttcatcctgctcccttagcccagcgcctgggttgccagcacgaaattacgccatccgccagcggctttaagcggctcaccgtctttatacatggtggtcggccggtcaacgcaggccagacccagcgcctcgagccactcggcgagacccgagtccgcttcgacgtcaacgcgcacaaattttccgctgcattcactcagtaactggcgaaccaacactttggcatcgtcaaggttgtcggcaatcagcggtccgatggcatacccgcgcccaaactgacgcagcaaaccgaaaccggcaatcttacccgcccgcgtcagcaacaggcccttttgcgtatgcgatgagtccgtctcaagcaacgcctgatacagcgcaaggcgctgcatgccgctggagagaccgtctagttcgctgagagtggccgcatcctcggcgttgagttcacgcagttgacagttttggggcaaggctggcgcagtaaccggcggcagttcgcggctttgctgttggcgaatctcgccggtggtgacaaaacccaacttttcatacaagggtttaccttccggggtcgcatgcaggcgcacggtcttaccctcaagcttgcccagcagcgtgacgagcagctttttgcccatcccgcgcccctgaaagtcagggctgacgataaccagcccgagggtggcgtattttttgccccacgcccagtaaagtgcgctgcccaccacgcgcccgttggcttcggccacccagcctttgccacagcggaaagccagctgccagtcttcgagacggtgcgaccaggatacggcctgagagagtccgtgacaggcgggtaaatcagccgccgtcatttcgcgcagcgttatttctgcataagaaggtgaaagctgtgctgtcatttacatcattcccggttttttaatatcgctgccgtcgctaaaacgatcgaagcggaaaggcgttgggtccacgaccggcgtactgccggtcaccagatctgacatcaggctgcccgcaccgggtccaatgccaaaaccgtgtgcgctgtagcccgcagagataaacaggccgggcagtttatcgacgctggagatgaccggtaccgcatcgggcgtgctgtcaatcatgccgccccaggactgcaccaccctcaccgccccaagcgcaggaaactcgcggcgcatcgcctctatgccctcttttaccatggcatggtcggcctcgggtcaaggatacgcaccttctcaaacggcgatcggccatcaaattgccacgaccccaaggcttcaggcccctcaaggaacgcccgtgggctgaaatgcaccttgagatttttgcgacgcgcctgaaaggtcgggtaaaactttttcgagtaacgcagaccctgtggacctatcgccacgcggccacggccggagacagacagggtataactgccgtcaagctgcgggcgacaggcgaaaccttcggtatagagcggcatcttgatcacctgctcgaccggtgcagtgcgcattgcggtgccaattacgttacccagcggcaggtcgatgccgtggcggcgacagaacattgagctccaggcccccccgcgcaaacgaccgaacccgcgcgaatcagtccgcgctcggtccatacgccgctcacgcaaccggcagagacgtcaagcccgcgcacagcgcagtattggaacaccagtgcgccgagcttttgggcggctatcgctagcccaggggccgccagcgagggctcggcgtggccgtcggtcggggaataaacgccccccagccaatgggagacgctgccctgggtcagctctttggcccgcgcggcggtgaggatttcgctgtacatgccgtaattttttgccatctgcccccatttttcccaggcgtctatctcttcctgttttttggtcgcgtaaaccagcccggtgttgcgaaacccgagctcttcgccggtttcttctttcagcgctttccagcgttgcagggcgtggatggagagcggcagttcacgctcatcgcgattctgctggcggcaccagccccaattacggctcgactgttccgcgccaatcatgcctttttcaagcaatacgacggaaacgccctttctcgccagctcataggcggtggcggcaccggcgatgccgccgccaatgaccacaacgtcaaccgcgtcggggaagagatgactgtcttgtacaaacctgatcggtgctggcatcgaatgcttttccttatctcaaacgcatcttctggtgcaaggggttaattcaatagagatgatttacgtcactgtatcaagtggcggatttatcgaaattaatgcaaagcttattcggcattgatcgactcttcggtactgccgtcctgctcctccagccagccttgccgcagctctggcaccgcccttttcagtctttcgtaatacaggctgctggaagtcttgtcgtagtcaatgcggctcacctgggtcgccatttgcccgtttttcaccacgatgatgtcgtcacagaccgagcgtacggcgtgaaggtcatgactgatgaacaggaacgacacgttaagctcgcggcgcagctcggagatgaggtccagtaccgctgcggcaaccaccgagtcgagcgccgaggtgacctcgtcgcagagaataagatccggctctgccgccagcgctcgcgccaaattgacgcgctgcttttgaccgccggacagccccgagggcttgcgatgcagaatactgtgcggcaagcggacaagatcaagcagctctttcaggcgcgcatcaagcgccttgccgcgcagcccgtggaagaacaccagagggcgcttcaggatgctggcaatggtctgactcgggttcagtgcggtgtcggccatctggaacacaaactgcacccggcgcagctcttccggactgcgggcagacatctcgcccgccagatagctctcgttaaacaaaatgtagccattgctgggagaaatcatgccagcaatcgcccgcgcaagcgtggtttttcctgaaccagactccccgataatgccgatggcctggcccggatagagtttgaaattgatgtcctgcagaatgctgattttaggtttaccgtcggcgtccagcggaccgtatccggcggccaagtcacgcacctcaagcaaacatttgaccggcgcgtcttccggtttccacgggctgttgcgcggtttatgccgcgccgcgtcgagcaggctgcgggtataggaagccgcaggccgcgtcagcaggtcttccgtggtgccgtattcagcaatctgccctttcaatagcaccagtattttgtcggccatctgcgccacgacagccaggtcgtgactgacgtaaatcgccgtcgtcccgcgctgtttgacgacgcggcggaaggtcttgaggacctcaagctgagtggtcacgtcgagtgcggtggtcggttcgtcgagaatgaccacctccgggtcgccaatcagcgccatcgccgccatcacgcgttgaagctgaccgccagaaacctgatgcggataacgttgaccgatagtttccggcgacggcagcgccatttcacgaaacagctcgacggcttttttctcggcatcggcacgtttcatggtgtggtgaataagtaccggctcgataacctgatccatcaagcgcattgccgggttaaacgacgccgccgcgctctgggcgatataggcgaccttcgagccacgaaactcgctgagctgacgagcagacagcgccgtgacgtcggttcccgccacgttcagcgcgccttgcgttatcctacagccgtgacgcgcatagcccatcagcgcaagcgcaatggtggtcttaccggagccggactcaccaatcagggccagcacctcgccctttttcacgtcgaaactgatgtcagagaccagcacaatctgctcgtcgctctcatttttggcctgcacttcaagctggctgacgctgaccagcacaggggcctcgttgcgcgtggcctgcgttacgtccttcacacccggctttgaatgaatgggaaatgtattcatgccgcctcctcttccagttcgagtctaatcacgcgacgcgtttgcaggctgtcgataaacagattcacgccaatggtcaggctggcaatcgccaccgccggtaccaacaccgccggagagccatcaaacaatgcctgaaggttttcatgcaccagcgtgccccagtcagcgtaaggcggctgcacgcccagcccgagaaagctcaggccgctgagcagcaacacaatgtagacgaagcgcaggccaaaatctgtcagcatcggatgcagcatgttcggcagcacgtcggttaatgcgatatagaatttgctttcacccctcagatgcgcggcctgcacgtagtccatcgaacgcaggttcgaggccatggcgtaggcgatacggtaggcacccggccaataagtgataaccgccgtcagaatcagcataggcagcgaggaaccaaatactgccaccatcagcagcgccataattttccccggcataatcaacagggcgtcgttgatacggcccagcagctcttccagccacttgccggacatcgccgccagcagcgccagcaacgtgccgcagacgctggccagaatggcggccgacagcgccaggccaatcgaatagcgtgcgccataaagaacgcgggtcagcatgtcgcgtccgaggtagtcagtaccgagcaggaaggcgcggctgaagccttcgttgatgccgccgcccgcaatgtcctccacgctgtaggggccagccagccacccaacagcgccatgcacagccagaacagggtaatcaccagaccgattcgcccggcgttggataacgaacgccagaagttcagcgccgtttttaacaccacaactgttttacgcatcactgagtcccctctggaaagtcacttattgtttcagcttcggattgaaggcaatggtggcgatatcggccagcagcagtagcagcagatagcagccgctgaacagcatcacgcacagctgcacaataggcaggtcgcgattgctcacggcatcgaccatttggctcgccaggcccggataactgaagatagtttcgataataatcaccccaccaaacaaataagacaggctcagtgagatggcattggcaatcggcccgaccgcgttgggcaatgcgtgacgcagcacggcgcgcagcggacgcacgcctttcagcagggtcatttcaagataggaactgtcgagctggttgatgatggcagagcgcgtcatgcgcgccatctgtgccaccagcacgcagcagagggtaaagaccggcagtgcgtacgcctgcaggtagcccagaaaattctgattggtggaacccagcgacattgccgggaaccagtgcagatgcaccgcaaacaccataacggagacggtcgccaccaaaaactcagggacggccaccaccgacatagtgcccaccaccagcatgcggtcaatcagcgaaccccgtttcatcgccgccgtaattccgatgattaccgccagcggcaccgacaccagcgtggtaatcccggccagctcgaaggtggcgggaatacgctgggcgaccattttggcgaccggtaaaccgttggcgaacgacttgccgaaatcgccgtgcagcatgccgcccagccattcgaaatagcgttgccaaatcggcaaattcaggcccagttgctcacgcagtgccgcgaccgtttccggcgtggccgcctgccccagcagctgctgcgccgcatcgcccggcagcatgctggtaatgataaagaccagcgccgagacaataaacagcgtcaaaatgcccgaaccaatacgacgaagaataagtaacaggataagctgattcataactgcctccagattaggatgccaaccagacgaactcactgaagcgatagcccatcatcatgccggagggataagactccacccctttaaccttgttgctgtagccgtctaacgaactgataaacagcgggataatggtgccgcagtgctcatagaccagcgcctgcatatcgccatacatctgcttgcgcctggcctgatcgcgttcaccgcgtgccgcagtcaccagttggtcgaactgcgggtttttccagccggactcgttccagggggcgtctgacttgtagaactggctgaacagcaggtccagcgtcgggcgggggttgaccgagccgtatgaaataggatgcttcatccagtgctgcgaccagtaaccgtcgtagggaacacgacgcaccttgaggttcattccgacctgtgcgccgagctgttgcaggaactgcgcccctccatcgcaccttcgatattatcggtggtgacgatttctaggctcggcttcactaacccggacttcttgagataaaacttcgctttgtcgagatcattaggccgctgcggcaggtctttattgaaatacggatgccaaggtggaaccggatggtcattggccaccgtgccaaacccctgaagcgccgttttaagcagcagttcgcgcggctgcaaatatttcatcgccagcacaaagtccggattgccggtgaccggtgcgtcctgacgcagaatgaggtcgctgtacatgccggacttgctctccaataccgagcaggatcccgagccgttgatacgctttacgtcgcgcgaactgatggtcgagacgaagtgcagctcaccggacagcaacgcattgacgcgcgccgcctggtcggtcacgcccagcagctcaacctcgtcgaggtgcggcaggccgggtttccagaagtttttgttgcgctcaccgagggtgcgatttcccggggtaaactctttacagacatagggccggtgccgacagccttgctgaaatctttggtgccgtcctgcaggataagaaacgctggcgtgccgaggatagacggcaggtcaaagtttgcctgctcgagtaccagttccacttccatcaggccaacggccttgatgctggcaaactgtttggcgagtgaaatcgcggtcgaggccacggcagggtctttatggcgcgacagcgagaacaccacgtcctgtgcgttaagcgacttgccgtcgtggaaggtgacgccctgacgcagtttgatgctccaagtgacaccgtcactgctgctaatcgactcggccagtcccatctgcgggataagtttgctgtccagctcagtcaggccactgtagaacatatattgccgcatgtagtcgccgctgttgttggccttggcgggatccatggtgtcggcggccgaggagttagcggccgcggcgcgcagtttaccgcccttgaccggcgtggcctcggcggcccaggctccgtttggcaggctgatgatgccggtgctgagcgccgccccggcggagaacattttcatcatgccgcggcgcgagatattgatctcagaaaaatttgaagcagacttcggtgttgctggacctgattctttacgaaatttactcattgaaatctccccgaatgcggtatttaccgaaaaaagctgttgtttttgatcaagaaaatccagtgcattgctgtgtgccgccgactcaagacaccttgtctttggctttgtaatacaggcccgccactggcaggaaccaaggcttgccaaagtatcccggcatcgccgcccagttgctgcgctgccacggattgcttaccggtttgccggtcaccaacgccgccatcaccttgcccatgtacaccgacatctgcgtgccgtggccgctgtagcccattgagtaaaacagcccctcatgctcaccggcgcgcggcaggcgatcggcggtcatgtcgaccaggccaccccagcagtagtcgatattggcattggccaacgacgggaacagctcgcccagccccgtgcgcaatacgccgccgctgcgggcatcggaggtcgggttgctaatcgcaaaccgcgcacggccgccgaaaatcagtcggttatcggcggtggtgcggaaataattcccgatattcaaggaggtaacataggtacggttgttgataagcgccgcctgaagtttggcgggtgccagcggttcggtggcaatgataaaactgcccaccggcacgatacggcgctggaaccatgagaacggccccttgtcggaggtgcctgtcgccagtaatacgcgtccggcgtcgatgtcgccgcgcgaggtgctaacgcgatagcggtgcccgtcaatctgctgtaagccggtgaccggggtctgcggataaatagccgcgcccttttcggccgccgcctgagccagaccgatgccaaacttgcccatgtgcatctgaccgccgcccttttgcaacagcccaccgtggaaggcgtcagaacccacttcgtcgcgaatatggctggcatcaatcagctcgacgttgctgtctacggtgcgtttgagcagctcgtaggttttcactagagaagggaaatgcttggccttactcgccagcttgagtttgccggtgcggataaaatcgcagtcaattgcctcgtctctgacaatcgactgcacgtaatctaccgcctcggtgtaggcgtggtaatagatggatgcctgctccagaccgagactttcaaccaatgaggcaaagttttgtgataccccggtgttgcagtgcccgccgttacgaccggacgcctgactcaaaacgtcgcccgcttcaagcaccacgacgtcaacaccggccagcgccagattataggccgcggacaggccggtaaaaccgccgccgaccaccacaacatccgccttcgccgggagttccccgctggctgcgccggtaaacgtcggcgccgtagcctgccaaaatgattcaagtttcatgcctgtgcctcatcctatgtgttcctgaccgcacgccgtttagtgcatgccttttgccacggtgacgtgacttacagccctaccacgcccggcagaccgccgatgtctttaatctcggtgtagccgtaggcagggttggcaggatcatgaccacgattaacccagactttgtttttgatgcccatgtcatggcaggtcatcaggtcgtaacgcaggcttgaggagacgtgcagaatgtcttcaggaccacagcctagctcgtcgagcatgtattcgaaaccgcgcattcttggcttgtaggactgcgcctgctcggcggtaaagacgcgatgaatcggtgcgccgagacgcggcacgtggtgggtaatcaggtcattcatggtgttggagagcagcaccagaggaaacgcctcggcaacctttgccagaccggcaggcacgtcaggatgcgggccccaggtcgcacaggcctccataataccggcaccgtcgctgtctttatattccacgccccatttcttgcaggtgcgggccatcgcctgacacaccacgtcgggataaggtttccacgcgcccagtacttcgtccatacggtaacgtgcgaagtcggtggtaaaagccaacatctcttcagcactgacgcggtcggcaaaaattgcgctcgccgcaccggccatgtcgaagttaatcagcgtgccgtagcagtcgaaagtaataaacttaggtttgaataccgccatgataatccccttctccgatagttttcgtcgtgtgacatgtagtggaaagttttaaaaatcaatcagtacgcttttgtaacgcagacaggcttcgaacgcctgacggccaaggtctttgccgatgccggagccgttaaagccgccggtcgggataataaaatcgcccgagcgcccgtagcggttgatccacacggtccccgctgcgaggcggcgcatggcgcgcatcgcgcgttcgatattgagggtatgcacgcccgccgccagaccgtagagcgggtgactggccagcgccagcccctgctcttcggagtcaaaggtctggatggtcaacaccggaccaaagatctcttcctgcacggcggcagagtctgcgccgacgcccgccagcagcgtcggtttaaagaagtagccctgttgggtatccgggaagaattccccccggccagcagctgcgctccttcgtcaatggcggtctgtacgatggactgaatcttcttcgcctgacgcgcgtcgataataggcgcgtagcggcaggcgctttgccaggtattcccggctcgacgctttcacagagttcaatcagcttgcctgtcagcgcctcggcgatgccggactgcaccactaaccgggttccggccacgcaggcctgcccaccgttagcggtaaaaccgcggaagatacgcgccgccaccgtctcgaggtcaccggcgtcgtcaaacaccagctgtgggcttttaccgcccagttcgagggtgaccggcttcatgccgttgagcgccgcctggctcataatctgtgcgccggtcgccgtagaaccggtaaaagacaccttgcggaccaacggatggttgaccaacgcgctgccgcagctcaccccgcggccctgcacaatattcagcacgcctgctggcaaaccggcctctatcgccagctcagccagcatcacgctggagaacggcgtcagttcggaaggtttgagcaccacggcattgcctgccgccagcgccggacccagcttccacgaggccatcgacagcgggaagttccacggcgtgatagcaccaatgacgccgtagggttcaggcaccagcatacccaggctgctgtcgcgggttggcagtacgtcgccgctatatttgtcgcagcactctgcatagaagcgaatcgcctcggcggtgaaaggaatttcgtgattcaccacgtcataaattgggcgcgtggaactgaccgcctcaagccggccgagagattcggcgttggcctctatcaggtcggcccagcggcgcaacaccctggcacgttcgcgcggcgagcgggttccccagccactctcccgccaggactgatgagcgttggtgacggctaggtcgaccagtgccgcatcagcgtccgggatatcgccaaggaattgtccgtcggaggggcggttgacgctaatgcgctcgccgtggccgacgtggattttgccaccaatcaggtgcccggcgggtaaaggcactttttcaggatcaaaactcaacataattaacaattccttcttatttacagggcttaaatttgtcggcgtcggcgacgcagaaaatattttcaaccaatgacggagcgatcaaacattaaccaagccgcatttaagctgtttatttaccactcaacgtcattatcgataaatttattactttgcggcctggaaaaaccgccaagaacatcacttttatcactggctaaatacttataagcataaagcgtgccatattacggaaaatttaaaatgcggtatgcacagccgaaaaaacgttttatgccgtgtgggagctcaaaacttcacagatccgttttttgcatttttgtcccgctgccaaagataacctgctgcaccaaataaatgattttatcgcctccgcttgcaccaaaataaacggcacgcgggaagcgaatttcattaacccgctattttataagataaaataggattgcactgagaaaggacgcgtcggcccgcgctgagacgttgatacgccacgatattttgcggtcggtattcaaagaggttaaaaagcggctacccgttaagagttagccgccgcgttggggagtaaaatgaaaaatgcgcagaagttaaatcgtcatgatttagttaaggccgccaatatggaaagacttcatttcaagatattcttcaattcccgctttcgccccttctcgacctattccggaaagttttattccgccaaatggcgctatttccagcgaaaccgatccggtatttaatcccaccattccgaattcaagtttttccgctacgcgccacgaacggcgcaaattctcggtaaagaaataagccgctaaaccgaacggcgtggcgttggctaaatcgatggcttcttgttcattatcaaagcagaacagcggcgcaacggggccaaaggtctcttcattagcaataagcatactggcgttcacgtcggccaataccgtgggtttggcaaaatttccttcgttctcggcaatccccccgtcaacaggcgggcgccttggctcaacgcgtcgtcaatgtggcgattgaccttctctaccgccgatttgttaatcaaagggccaatctgcgtgccttcggcaaacccgtcaccgaccttgagcctgcgggtctcctcgaccaggcgggccgcgaactggtcataaataccgcgctgtaccagaattcggttggcacaaacgcaggtctggccgccgttgcggaatttgcttaccatcacaccggcaatagccaagtcgatatcggcgtcgtcaaagacaataaagggagcattaccgcctagctcaaagcttaggcgttttaccgagtcggcgcattggcgcatcagaagctgtccgacgcgcgtcgagccggtgaacgacagtttacgcaccagcggattaccggtcagctctgccccaatcccctgtggcataccggtcactatctgcaacgcgccgcccggaataccggcccgtgaagcgagctcagccaatgccagggccgacagcggcgtgagatcggagggtttaacgataatcgggcaacccgctgccagcgcgggtgcgcacttgcgggtaatcatcgcaatcgggaaattccatggcgtgatggcggcggcgatacccaccggctgtttaagcaccagaatgcggcggtcgcgcgtcggcgaaggaagggtttcgccatagatgcgccttgcctcttcggcaaaccatttgacgaagctggcaccatagcgcacttcaccccgcgcctcctcaagcgatttaccctgctcggcggtcataataatcgccaggtcttcagtatggtcgaggatcagctgataccatctctccagcatcccggcacgttctgctgccggtatttcggcaaactcatgacgaatagcctcggcggcctgaatggcctcgcgggtgtcctgttggtccattgccggaaccttggcaatcacctgcccattagcaggattcacgacgtcgagggtttcatggctgtgagcgtccacccagcgtccggcgataaaagcctgctggcggtaaagagagggttctttcagggacagttgcggcatgttttctccactaagcgcagtaactcgggggttcaaattactctaccggtaatgtggaattttttgtggggaatgcgctcaggctgacagcagattctgcgttatacggacgaaaaaagaaatttcgcagcctcccctgcaaacagcgttcggttacaaataagttacatttagatggcagtctgactaaatcaatagccaaacgattaagaaagcagcacaatgcttatttacttaaggcatataaatagtaatgaaattgcattagtaaaattaccttatgtcttctctatccctcacaatgattaggaatatactcttcaattccctctttaacttggtttattattatatttcagaataatctccgtcttatttttttaagtgagatattttacactttttttaccaaaatagagccaaattcaataagataaggtaaagtaaattcgtggtcacaaaggagtggtatcactatattcctgccgtaatacgccacaatgcataaacattactcaactattatggagcttattatgaaagaacttaacactgttgaagtggatcaggttgctggtggcggtcttttaactagcctgctgggtgatgtagcgaacgctgtatctccactggtaaaccagctggtaacaacgactgttccaaacgctgttgaaagcgttgtcgaaggcgttaacggcgtcgctgatggcctggcgtctgcactgcaagctgttttctaataaaacagtaacgcatgaatacatgtttcatactcgtaacccatcaggattttcttgaattacgagcatgtgacattacctcgcctgtagcctgaactgcaggcggggttacctcaaaagtatcttgatgtagttctctgaattgcagcgtattacgctgtgcaaacttcggcaaatttaatacggataatttttgctgcctgaattttgcgcataaataatcgttaaatgacagatgtacataaattttcggcaacatgaatattagtaaagattttttaaagccgggcgacagtgcgtattaaaaataagccactctcatttttggtagcacaatgtaattattacaatcttgattacgtatgggtattaatatccaactcagattaataaccctacacgtattggggatctattgtcacggcgataaattaacacagtgatttttattaatttcggaggttattgtgagagtactcgagactaaagaagctgaatgcgtcgcaggcggcggtgcgttagatttagtattcaacgttgttaacgacgtcgtctctttagccgccccctctgccagcactaacgtcaaagtcgttgaacagggtacttacgcagacttgcctctcgctctgtagctgttaattagcaatagaacctactcatagtgcttatgagttttttaatacgacaaattcttacctgtgggacggatgatgttatcaccaggtagcaggtgaattttctgttgacgtcctgattcttcatcgtcaacaacagaagaatctgcgatgtttgccgtgttaagagaaattttaaccttttcttaaccccacaacctggtttagcaaccaaaatcgggaaatggtatacagttattgagggtcctgcgggaaaaaactcaatgctgcagtagataagatgagtgacaaccacacagggcgccattcagcctttattaataatttcggaggttatcatgaaagaactggacactaaagaagttgaacaagtagcaggcggcggtttgatcgacacattattcaacgtagtaaacggcgttaccggtgcaatctctcctgacctgagcaatggtgttaaaaccgttgagcaaggcgtttacagcgttctcggcaacgttgtttaacacgtctgaatgatcgaccccatgtctcatacccaaaatttatcacctgcgtatgcacttagataaaaaagaaagccagtagtcctcctatgagacattgcttccacctgcagctaacgctgcgggtggcctaagtcagacaccaccctctcctttgacctctaacagcccccttactgaaacccgaagcgaaaattttcttcatattccaaagaagcaaactgccgccatttcgcactcaaaaaatcaacagcagcagtctgtcttgtaaaatcatcaattatcagtgatttgatacatcattataaaaagttttcattattaacagtaagttacaattgcatttcatttctgcttcactcaattatgcgatcgtccaataaatagccttccattttataaaattaaatcatatagtcagcaaggatttgaattatcaataaaattaatgattaacccttcggttaggatgctaagaataagataaatttatgcgtcaattgagtggcatgtttttcataaggcagaataaaattcgacattaatataatatgtgaaattttacacttttctcacataacaataagccaaattcaataagatagggtagagtaaccccatgatcgcaaggtgatgccttggcgtatctctgaaaaaaatcagcgatcattattaagcttttatcaataatttcggaggttattatgaaagaattaaacactatcgaagttgaacaagttgccggtggcggtttgttgtcgagcctgatttctaacgttgccgataccgtgggtgttgctctgaataccgtatcaaccgttgtaaccacaaccgttcctgacgtacttgataatgtaggcaccggtgtgaccggcgcactgaacgcactgggtgtgactggcgcgttagaagctctggtataaaatccataaactattatattcatgtcacatactggtcaatcatcagtcctctttagcatggccagcgtgtaacattctccacctatagttcaggctataggtggttttataagccctctgacagagtattttgatgtccgcacttttccgtaaggaagtcgccactcagcagcagactcagtggcttggcaaggcgctattgcttaaaggctggccgctatggattaccgtctccctgaccagcctattcatggttttacttctgctatttctgatctttgccaactatacccgtcgaataaacgtcagcgctgaagtgattactcagccgtataccattaaccttttttctccccagcagggcgttatttcgaagctgctggttaaaaacggtcaacgtgtaaaagccggtgagtcgctgtatcaaatagacgtcagccagattagccagtcgggcaatgtcagcacctccaccctggacgctatttataagcagaaacagcagctcgaagatattgtggcccagcagcgcagcaataaggctgccaccttagccaacctgcagcagcagctcgaacaatatcagcaggcgcagattggcctgaataaaatgctcgcttccgcaaaagacggcctggagtcgatgggaaaaagccttgcctcttataatgattccttgaagaaagggttaatcacctccgatcagctgaacaaccagcgttacttgtattaccagcagcagagttcctatcagaatctcaccgcgcaggtggtccagcagtctctgcaaatcagcaatttgcagagccagaaagtgactaaggccgcagagtttgacaatcagatttcccaatcaatctaccagcaacaaggtctggatcgcgaactggcagaggctaatgcccgaaatctgattatgatcaccgcccccacggcgggaaatatctcgtcactgagcgtgactcccggccagatggttaataccggggatagtctggtacagctggtgccagacagcgagcatgcgttttatctggtcgcctgggtgccggatgccagtcgtccttacgtcaagttgggtgagaccataaatgtcagttatgccgcattccctttccagaaatatggccaatttcccggcacgataatttcggttgccagcgcccctagcacgccaaaagagatgtcgggctacgttagcgcgccgcgtatgagcaccggcgccgtcgacggcagctatttcaaggccatcgtcgctctgaagcgaggcacgctctcctggcacggccaacctttagccttgtcgagcggaatgcaggctgaaaccaccctgtttctcgaaaaacgcccgctgtatcaatggatgctctccccatactacagcctgaagaaaagcattacaggaccggttgaatgaacacagagccgttggacgaactcgtacaaaagttacattttagcttccgccgccgagtgccacagataatccagaccgaggccgcagagtgcggtctggcctgtgtggcgatgatttgcggatattatggcatgcaaaccgatctgctgagcctgcgccagcagtttgatgtttcgacgcgcggcgtgaccctgaaaacgttaatgagcgtgacccagcagctgaatctgaagtcacgcgcgctgcgcctggacctcgacgaactcaccgagctgaaaacgccctgtattctgcactgggatatgaaccattttgtggtgcttatctcggtcaaacgtggtcgcatcgttatccacgatcccggtttcggcaaacgtgtgctgggattgcaggaattgtcggcccacttcaccggcatcgcgctcgaagtctggcccgatgccgactttagccacaccaaaaacgttaaccgcctcaacctgcgtcgtatggccagtaacgtcagcggcatcgtcggcaccctcactaagctgttctgtttctcgctgctgatagagtcggtgaatttgcttctgccggtcggcatgcagctggtcatggaccacgttattccggcgcaggacgccaatctgctcacgctcatttgcctgggcctgctgttcttcgtgctgtttcgaaccggcatcagcgtccttaaatcctggacccagctggtgatgaccacgctaattgacgttcagtggaaggcccggctgtttgaccacctgctcgccctgccgctggcctatttcgagaaacgcaaactcggtgacattcagtcccgcttcgtttcgctcgacactttgcgcagcacgctgacctcgaacgtagtgaacagcctgatggacggcatcatgtcggtgggtctgatagtgatgatgatcctttacggtggttggctggtgtgggttatcctcggattcaccaccctttactgcctgttccgactcagtacctactccacctatcggcagatttccgaggagcagttggtgaagaccgcacgcgccagctcgcactttatggaaacgctgtacggcatgggcacgctgaaggcgcttggcctgtcctccaatcgtgcgcagcgctggctgaatatgaatatcgacaccgctaacgcgacagtgcgtaagacgcgttacgagatgatgttccagggtggcaacactctgatagccaccctcgaccagattgttctgctgtggctgggagcgaatcaggtgattgatggccacatgacgctgggtatgtttgtggcttttaacacttatcgcggacagttttcggaaagagcggcgaacctgctgaacatggtgttgcagctgcggatgctgtctctacactctgagcgtatcgccgatattgcccttaccgacgaggaacattacgttaccgagcgcgccctgctacgccagggagagcccgccgcgctggaggtacacaatgtctccttccagtatgacgtgctgtccgcgccgctgattaaagagctcactcttaacgtcgcggcaggtgaaagtgtggcgataaccggcccttcgggcatgggaaaaaccacgctgatgaagctgctttccgggctgctgctgccaacctcgggcgaggtgcgcctcaacgggatagacatcagcaaggccggcgtcaacaattaccgcgcctgcatcgcctgcgtattacaggacgatacgctgttcgccggctccatcgccgagaacatcgccagctttgaagaacagaacgatcccgaacacctgatcgactgcgccaagcgctgtaatattcataacgatatcatggcgatgccgatgggttatgaaacgctgataagtgaactgggcggcagtctgtccggtggccagaaacagcgcctgctgattgcgcgtgcgctgtaccgccgaccgagcattctgttcctcgacgaggccaccagccatcttgacgttgaaaacgaggcacacattaatgcctcgattgctgcgctaaaggttacgcgtgtcatcatcgcacaccgtccttcaacaatagcctccgctgaccgcgtgattgtgctgggaagctaacgctgcggacgctcgccgcagagatgaaggtcgagcgggtcgagtttagccatcacccgttcgacatgcagttcgcccgggaggtgcggaaataccggttcagcccaggggccacccagcacacggaagaagttttcgactaccgtggccggcaggaagccgataaaacgcgtgaagtgaaagttcaacgggtaaccatggacggttcccgtagtcacaaacaccgcatcacccggctcggcaatcagccgctgttgattagccaccgtctacccgctcattcgcccactctttttctggtttcgcgcgagagcatttcatccaccacgccgcccacaatggcaataccctcggcaatatcctcgactttgatcgacgaaaaaccgatgcgcatatagtttgttggcctcgtctgggtcgagttggaaagcggcagaaaatagctctcgcccggctgaatgtaaacgtcgcgcgcataggcacgctttgagagttcacgggtgtttatctcggcaggcaggcgcagccatacggagctgccgccttctgagttagccacctcggcacaggggataaactggcgcagcgcttcctgcaaagtacgccacctcaatgcatactcctcgtgaaagcgcttgagcaacgactcgtaataaccgcctttaagaaacagcgcgatggtgcgctgattattggccgcagggtggcgaatgctcatgcgccgtagtgcacgagcctggcgaatgaacggcgccggaccgaccaaaaaccccacccgaagtcccggtgaaagcagctttgacaggctggtgacgtagaccacgcgtccgtctgtgtcgatagactttagcgcgctggacgggtatctgccgaagcgcgactcggtgtcgtagtcgtcttcaataataataaagtcgtagtctttagccatttgcagcagctggcgacgacggcttggtgacaacgtcacggtggtcggtgactgatggctcggcgtgacatacagaatatcgcagccgcgtagcgcctcgctgataatcagtccgtcttcatccactggcagcggcctcagcaccgcaccgtggaaaatcatcaagttacgcacatcgggatacgaaggatcctcaatgcctaccaccatgccggggcggataaggcactgaatcgccagaaacagcgcatgctgagccccgacggtgaccagcacttcctgagtaccggcactgaacccgcgacgcggcaagacccgccgacgaaacgcgtcgagcaacacgggatcatcttcatcaacataatccacggtccagtcgtacatatcgtgcaacgagagcgaatcgcggctgcatttacgccagctggagatcggaaaaatccatcggtcgtgctgcccatacataaaggtgtatttcttgttgcgccagtcgtgcggatgagtaatgtgctccatctcggcaggattaatcaccagtttgctgtcccagtcgacgctggccgggctttgagccatcggacgactctgcggcaggcgagacatcgcatctggcgcgacgtaaaatccgcgtcgctgcgccgaaatcaggatgccctccgccgccagctcctcatacaccagcgtgaccgtattgcgggaaatcttcagctgctcggccatggtgcgggtcgcgggcagcgtctgtccctcttcgaagtcccgcaggcgatggcttcggaaatcttctcacgcagcttcgactgcaatgagccgtgcgatttactgtcgagagtcttcggaatcaataagttgatcatccgagcctgtcctcactgttttaaaggtttagcctagtccgcgaatggccggaaacttgtcggttaaaccatgcaaaatctcggccatttgccgtgccatctgctgttcatcctgcggcgtaggctgtgtggacactgcggcaaatacctgatgcttgaggaagtgtcgccagacgaccggcagggtggcgagaaattcggttagaatcgcatagcgtgcccgtgtccagacggcctcaaacgccgagcgcgcgctgccatagtcaaagtgttcaccgttcggttcaggcatcgcgctgcgggttatttccgtctcgaaggcgtcgatatcaccgtcgactatcacgacgccatagtcgcggcgtgcgccctcgacggtgacaaacccgcactgcacgtcgcgcagtacgctttgcggcgaacgttcacgcgccgggccatagcctcctgcaccagggccaatcaaccgcacaacgtcacccgggccgcatttgataacgtcgatgttgccgtgttcaacctgccgttcggtgtcgggatgggtctgaaaacgggagtttttaccggcgttgccgcccgccgcgcccgccgaggcaaacaccgagcgattgcggttacgcgccgtgaccacggtattgggtgcggtgacttcgaactccatcaccgttgccagtccgccgcgatagcgccctgcgccccgctgtccgggtacaatccgtagcggcgcacgcggatcggtacctcggcttcgttaatttcaactggggtgtttttcagaaacgccgagagtcctcccgatccgtccggcccgtcgtgacgcggtgtccccccgcaccgccgccactggacctatcgaggccaccaccgtgcggctttgtgcatccacggttttaatattgacgatagagttgccgcccggcgaattggcgggcagcctttcgggcaccgccagtgaaaacgcccccagcgtggcaatctgtgagaccgcgcaggtcaaggaacgcattcccaccgcggcgggttcctcgcagttcatcaccgtgccggcaggcaaaatcgcccgtgttggccgcagcgttccggcgttaagcagcagacgactgtcaagcgtcgagagcacgtaagtcacgcctaccagcgccagcggatgacgttctcgcccgccggtgggcatatttagtgaggacgtgagctgcggatcgctgccagtgtagtccagctcaagggtttcacccgtaacgcgcagcgtaaccgcgatacggcagggatagccccgtcagtatcttcatcagcataatcggcatagaagtattctccgtctggaatcgtggcgatgatgttgcgcgcctgctgctcggcgtagtcgaggatgccttcgacgccttgcaggaagtcgtcgatgccgaagcgggcaataatctcctgcaccttgcgttcaccgatgtttaccgaggctatctgtgcgttgaaatcgccccaattttggtccggcgcacgaacattaagacgcataatccgtgccacatcttcattgagctggccgccgctgatgatctttatcggcgggatgcgcaaaccttcctgcacaatttcggtcaggctacgcgacagcgaggcaggtaccgcaccgcccacgtcggtgttgtgaatgtggccgaccacgaagcatgctatctgcccctgataaaacaccggtttccaaatgtgaatatccggcgaatgggtggcgacgtttccggcgtaagagtcattggtgatgcagatatcgccctcctgatagtcctcgataagcgtcagaaccggtgcataatcgatgccgctgtaccagggtgcaccaaaactgcgcggcgaggcgaaggccagcccctcgcgggtgactatctggcaggagaaatcctcagtttctttaacgaaggtcgagtgggcagtacgcatcagggtaaaggccattgcatcagcggcggcggcgcagtagttcgccagaatttgtaaattacgaccatcaatagccatgctccacctcttcagtgtttgtctgtaacggcgtaatgaccagattgccgaaggtatctacctcgacctgcattccggtaggtatgcaggtggtgcagtcgtcctgcgagacaatggccggaccggtaaaacgctggcctgccagcagggtctcgcggcgcaccacaagcacatcgcgctgagcgccgtctacccatgcgctgacaatggattgtggaatgaccgccgcgttactgtgcggcagttttatcaggtcgggccgtgacgttggtgagctgatgaccagacgcaaattaataatttgcatggcggcacgggcatcgcaatgaccgaacagcttcaggtgctgttgattaaacgcctggctgatggcgtccaggtcgccttgcgccagccagtctgggttaagcgcaacgtcaatttcaaacgactgcccgcgatagcgcatatccgccgaaaattgcaggctatagggtaaatcaacgccgtgctcgcgccgcagccacgcctcagcgacgtctttcaactgcgcggccgcctcggtcatctccgtcaggctgtgcgtattcaggtcgcgatacagcgtgcggatgaagtcgtttttcaggtcggcgaccaatccacccagcgcggagagcacgcccggcgtaggcggcaccaccacgcctttcatgttcagttcacgggccagatagcagcccatcatcgggccagcgccgccgaaggccaaaaaatagaactcgcgcgggtcaatgccgaagcgtgagatcaacccgctggtgtcggtatacatgctcgagatagccagctgaatgagggtttcggcggtctcctcaatcgaaatagccagcggttttgccagcagcgctaccgcacggcgcgcggcctcaacgtcgacgctgacggcgctgtagcccagtgagccgtgcccaagcaacccgcaggcggcaaaggcgtcggtcaccgtggcctgctgaccgccgcgcccgtaacaaaccgggccaggcagtgaaccggcgctgtcgggccaacctgcaatacgcccaggctgtctatccacgccagtgaaccgccgccctgaccgaccgaggtgacggaaacggaagggataaaaatctggaattcgccgatcgcttcgccgctgccgtattccggtctgccttcgacgatgacggctacgtcggcgctggtgccgcctatatccaggctgagcagtttgtcgtagccgcactggtcggcgatgtagcccgccccaatcacacccgaagcggtgcctgagagaatcatctgtacgcactcggccttggcctgctcgacgcccatcacgccgccgttagacttggttatcctcggcaggaccggcacgcccatctcgctgagcgcgcgctcaaacgcgcccagataattgatgaccttgggctgtacgtaagcgttgatggttgcggtaatggtgcgttcgtattcgcgaatgatcggccaaatttcgcccgagcatgaagtcagcatctcgggggccagttcggcgaccatttcgcgcacctgcgcctcgttactgggattgcggtaggcgtgcagaaaagccaccacgatgccttcacagcccagtgctttcgccttttccactgcggcaatcactgagtctcggtcgacagcttgcagcacgcggccctgaccgtcggtgcgttccttgatggcaaatacgctgtcacggctaattaacggctcggggcgacgggaaaacaggtcatggatatgcgggattttaagccgcgccagctccagcacgtcttcgaaggcttcggtggtgaacagcgccagcttgacgcccttacgctgaatcaccgcgttaacccccaccgtggtgccgtgggtgaagtaatgcacctcggcgggttctatgccgaacttttctctcaacagacctaaaccgcgggttatctcgctgccggggctatcgggacgcgacagcactttcagggtgcgaatactgttgtcacgctcgtcaagaacggcgaaatcggtaaacgatcccccgatatctacgccaattcggtaagtcattgggggccgtcctttgttatgaatggcttaacggtgagacgcgtctcggctagcggtatcgtgcaatgagcggcgggattagcgcgggtaatttccattatgctctcgggatgtgtcaccagattccagccagcgcgctgataaaccggctgcgcatcgcgggtggtgagcatccatttcgaaacattgactaaatcgggatgactgcgcaccaccgccgacagccaggtgcccaacccacggccacgaaaggcttcgtcgataaagatatccatcacataggccaaccgggcaaagtcggtgacgatacgggcgaaaccaatctgctggccctgataataaagcccgagcgccaaagagtgggcaatagaacgcatgagcgtatcgcgcgactgccctctggcccagtcagactgttcggaaaggaaatggtgaatcttctcgatgtcgagccggtcgcggtcggtgctgagctcatagccaccgcgaacccactcgacaattttattatcattaacccaagccatgccgttacctgtgtggttgccctgtgaaaaacgttaaggcatttaaaacacagaacccggagtggtgttagcgccagccggcggcattcgatggtgccagagagggggatggttaacccgagttggcggggttagcgcaagagatggcaatttattgttttttagacaaaaaataatcataaagccggtctctggcaatattcttcattttaacttcacacataatatcgaagtcgctaaatgacagcgcccaatcattgagcgtgtcattaaaataataatccgaatgcgccctgagtttcatttttgaaacacccagcgtcgtttggtctggataaccgccatcaggaattatcccctcctgagaaatggagtaatgtaaaacgggcctcacccctttccatgatgattttatcgcctcgatgcggggatcggcgggctgaataaaagcattttccttcacccagtgatgatgaatatccagcacaatcggacataattccgccgcctgtagcacgtcgtccaatgagcaggaaatttcatcgttttcaaccgttagcatccgcctcgcttccgggcttagccttttaaaagaggcgctgaaaccgtcgaagccctttttcccattcatgtgaatattgattttaaagtcctggaatatgcgcccataccccattaatcttgcacacagcgcgtgatattcaacgtcctcaagcgctctttcgaccacctgcggattatccgacgccagcacggtatattgcccgggatgaaacgacagcctgatatcatgtgcgcgggcaaactcgccgcagcgcgtaaagagtggatacaaactgggcaagaattccgcatagcacgcccccgcctgaacaacggtatataaaggcagcaaatcactgcctattctcatcatccttaacgcgggcggttgctcagccagtgtctgcaacgtcagaaaaagattctttaaatttgactcggctatttcataaagcagcgcggtctgctggtctttattcaggctcaaaaagcgagtgcgcgtcgttgctctgaaagggaatggctgatgcagttcagagtcaaagtatttacacgcgaatcctaatttcatgctgcgtcctttataagttcgaggataaaaccgctttggccggcgatttgcgccggacgcaaagagaggttttattccagactgactaatttattcattaacaggcggaacagccgaagccgcatgcgcataaaacgctgttcaactttaagcccaacgtgccctgatgaccaaagcgcagcgtcttgtcaccgcgcggcttccacgctggccaatggatatccccgtctatatgcgtgctctgcaccgcagtgtgacgggcaaagttaagccagtattcgctgaccacgtcggcgaaggcccggtcctgtggagtaaacccgccgccgaggatctgagcgtcgtcaatcaggtgcatattattcatgacgtaggggatttcgctgccgtgccaggtcccgtgtgggcacagcgcacgggcattttcagaaacgtaatcgaaataataccgccagcccggcgcgccggctttatgttggcccagcatcgcgacgtagcccatggtggtaaacgccatgtcgcggctgatttgacgccccagctcctgggagcttttaacgccgggataaagccacttaatcagccgcaggccgagcggatgctcttttttagccgcgttaccacgcctgcaacatcgatattgaaatagctcaacacgctggcctcatcgctgttgctgccaataatcagcggcaacggatgttgtttgcctgcgttaaaggtctctatcatcggctgtggcagcacgctgtcgcccgcgatagggaccggtgcaacgcccagctttccgctcagcggccagaagctttcggcggggagttcgcgcaactgttcggcggtggcctgcgtcaggccaaagtgctgcgctagcgccttaccgcgatgcagcgccttatgccgcgtggtgtcgggcaaggtataggccgactggacaattcccttatggaacagcccctttgccaacggcgaagcaaacagggagagcacgctgcgcgcaccggacgattcgccaaaaatcgtgacgttgtcagggtcgccgccaaaggcggcaatattgttttgcacccattgcagcgcggcaatctggtccagcagggcgaaattattcaccccctctcctgcggcatattccgcgtctaacgccgggtgcgcaaagaagccgagatgccctaagcgataattcagggtaaccagcaccacgccacgtgaggccaacggcgcgccaatgtagggagaaagaccgccggagccgatggtgtagccgccgccgtggatccagaccatgaccggttttttaccgtcggctaccggcgatgccgtccatacgttcagataaaggcagtcttcgctgaaggtaccggggtcaccgcctccaaccgccacacagtattcgcgattttgccaactcgattgcccgaagcggttagtttcctttataccttgccatttttccggcggctgcggcgctcgccagcgcaatggcccgaccggcggcgcagcaaaagggatgcctctaaaggtggcgataccgccatcccattccccgcgaccgttccggcgtctgttgtcaccaaaggggtgtgttcatcgggcatggtgaatccttcttaagagagtgttgccaggtcgacaatcattttggatgccatttgtcatcatctccctttttataggagtgcttaacggcggcccaggccaccttgtgcgcggtttcttcacgccctgcgtcacctcgtctttcattgaggctcttatattcttcccacgcgctgttaaacgcttccttatagatgtcctgcgcatgtgcaggaagaacatgctttaccgagtccggcagtgcggttctattttcataaggcataggcagtctcctcttttcaaatcaggcggtttagcctcatctatcagtctagctgctacgcttgaagataacgggatttgggcataatcgtgaaaattcgggcaacttttttacacctgagacaaacacgcttaccaccacgttaatttacctatcttttcaaagaagacattaacctaaaaaacacaaataaagtactgttaaataacgactttatttaacaatatctttctaaaaaccttagttaaggcacagtaaatacagagttaaccccttaaaatacgcactacaaataaaaaaccacatcaataggatttttagtatcatcagcccgaaacataagctacaatgtaacaagaaattactgttattaattatagaggtatcaaactctctccggacaggccccatgtttttcgcacaggtaaatcctcgtttactgcctgacgaacagcatcatttataaggaaaattactaccatggtgtcagcacaggaccaacacaagcataaatcccgtcataaagagtattctctcgtcttccctattatcgcccttatcgttctaatgctgtggggcaacagcagcaactttggtttcgtgataggcattaacctgattgcactgttgggtattcttgccagcgcctttagcgtggttcgccatgctgacgtactggcccatcgtttgggtgaaccctacggctcgctgattctcagcctgtcggtggtgattctcgaggtcagtctgatctcggcactcatggcgacgggcgacgcggcacccgccctgatgcgcgacacgctgttttccatcattatgattgtcacctctggcctggtcggcttcgcgctgctgctcggcggacgcaaatttgccacccagtacgtgaatctcggcggtatcaaacaatatttaatggccattttcccgctggcaatcatcgtactggtgctgcccgcggcgctgccaggaggcaacttcaccacgctacaggcgctatttgtggcggctatttcggcggcaatgtatggggtattcctgctgattcagaccaaaacgcaccaaagcctgtttgtttatgagcacgaagatgaagacgaggatacgcctcacggtaagccgtcgtcgcataaaaacttgactcatgcgctctggctggtcgtacatctggtattggttattgctgtcaccaagttcaacgccaacccgctcgagacgctgctcaccgaacttaatgctccggcacagttcaccggctttttagtggcgttacttatcctctctcccgaggggctgggcgcactgaaggcagtgctgaaaaatcaggtgcagcgtgcgatgaacctgttcttcggttcggtgctggcgaccatctctttgacggtacccgcagtgaccattatcgccaccctgaccggacaagagctgatgttcagcctggccccagccaatattgtggtcatgctggccgtgcttatcctgtgtcagatttccttctcgaccggaaggaccaacgttttgaacggtaccgcgcacctggctttattctgcgcctacatgatgattatcatgctgtaagtctcagcatttagaaacaataaaggccgccagaattggcggcctttctactgaaacttcagtgtgagttatgagtaggcgttcagcgcatgttggcacaaatctgaacgtacgcagtcttctttagtgaagcgaatgatgccgaccatctcgtcttctttgaagcgagtcagtgcatcgctaagccctgataccacgccgcgcggtagatcgcactgggtgacatccccgttgactatcaccgtcacattttcaccgagacgggtcaggaacattttcatctgactggctgtgacgttctgggcttcatccagaatcaccaccgcattttcgaaagtacgcccacgcatataggcaaatggcgcaatttctaccttccctatttccggtcgcagacaatactgcataaaggaagagcccaaacgacgaacgagaatgtcgtaaactggcctgaaataaggagcaaatttctctgaaatatccccaggcaagaaaccgagatcttcatcggcctgcagtaccgggcgagtcactataatcctgtctatctctttgtgaattaacgcctctgccgctttcgcagcgctgataaacgttttgccacaacctgcttcgcctgtggcaaaaatcaactgcttattctctatggctaataagtaatgaccttgagcttccgtacgcgcttcgataatggaggtgtcgcgagtatcgcgagccataccgatggattccacaccgcccatgttcactaatgaggtcactgattcttcctcacgttggcggtgactgcgtgagtcacgtctgattacacgtttcgcttcacgacgagctttgatcactgctttttgtcttcccatagtggcaccttacagtttgtttcacttaacgctataggccggaggcccgcacgattatgtttcacatacagatgaggttttggtctccttttagaccaagttgagccaatgaataacgtgaagagaaaataaagaccgtcgattaataattaatctatttctccatttcttttcacgaggaggcattgtcatgaatgacaaaccactgaccataacagtcaataagccagtaaaaaaaccaaaagaggagaagggttgtttcagtgagggtgccaggtcagttaaagaacgtggtcgctgtgaagtcttggatagagagaataaacgtttactattgctacatagaaaactgcttaataccagagagtcggaggtctgaccctcgtctgctgaaaaatcaggacaacgagtggagaatgatgaagcgttatttttacagcctagcccaaacatggactttaccattcgctatccccgcagttgctgctagttaatttcagtataacgatatctgaaaacttcgctagcggtgttacttgaatgtaaaaaaaatatttgaaggagtcaataggatcccagatcctttttttgatcaaaccacccggagactttatgccatgtttccggatagttttcatcatggtatgtgacactaatatgaaacgagaaaggttttaagcgcgaggatctttctaggcgatcaagttttctttacgttcctgatttaaataaccgtgaataccgctcgccagagccttggccatttttaactggaagcccggctgttgcagcaatttctcttcctgatgattggtaataaacgatgtttctaccagtacggaaggtatacgcggtgattttagcaccacaaaaccggcctgttcaatatgacggttatgcatatgatgaacggtctcgatatgggttgccagatgtttgccaaactcgaggctgcggttaatggtttcggtctgatcgaggtcgaacaacgtctgtttcaggtaggcatcattggtttgtacatcattgtcatagatagcatcgacgctgttttcactttgcgagagatagcgcgccatagcactgcccgcgccgtgttctgacagcgcaaaaacagaggcacccgagacctgatcgttactaaaaccgtccgcatgaatagagacaaataagtctgcctcatgctggtgtgctaaattcacccggtgatagagaggaataaatacatcgtcctgacgggttaatactgcgtgtattttatactgccgttgcagctgctgttgtaaatgtctggcaatatccaataccacgtgtttttcataggttccaccgccaccaatagcgcctgggtctttaccaccgtggccggggtcaatcattaccagcaaaggtcggttgcttattttttcctcaggtttataagcctcaggctccggctgagcattttctttttccaccgcaggaatagcggccatcgcccttttgctaccgtcacgctgatacgttttaacccttcaacgttctgatggcttattttcgccgactgattgagctcaaaaacgatacgcgcagtttgcgggttaaagtgcgcaattttagcacggactatccacggaaatttttgtttgaccaccaccagcgagtgcattaatgacgacgagaacgcggtcattgaaacatcaatcaccaccctgtcggggttatccaacgtgaacacccgcgcatgcggatcgttcgctggcagagtaatatgtaaactgtcgctggttgatttgagatccaacaaagctattttttgtgcggcaaatatctttggcgataccagagtcatgcccattccaaagaccagcagttttcttcgggattgattaatggtcataaattactcactctccagggagcacattgaacggtcaggatgtgtggagagattttcgcgtaagcctttttccgtgaccagtaacaatctaataataatcaggttatttaatctctttttatttccaatatgtttaaaattcattaatctgaaatgtttgaattactttattgcactttgaattgttttttaattattatcattgatgtgctaaatgtgcgtcattgtcctgaagatgtttttcgtacagtgccgaaaataacaacgttttaaaaaattccttgttatcttgtttagacgattccccactttggcgctttttacgacgcctctcttctgcctcctgattgacgattccgagggctctttcatagataaagttgaataaaccacaaaaaatgtccgggttatagtaggcaatattcagttgtatgtcgggtaccgaaaaaaagtagtccaccaccggagccagctcacgtttcctgagtttagcatcgttggagtacagcgacccgatactgcttctatccaaaaagagagcatgataattgcgcagtgcgcgtctatgatggggattacgggtatgagcaaaaaaatggcgatagaaggcggcaccaaaactgtcgtacttggcgatatagtcgaggaaaaagcccttgtcagacatcaggtgacgggcaaattttgacgcgccagaaacattaaagtttttaacaactgtgttcgccttcagatatatctcctccgaaaaagcatacttactctcatcgaaggtcaaatggccaagttcgtgcgctagggcatattcaataaactgctggttagataaataatccagtatataaatatgtttatcgctctcgctgttataaacgaagctgaaagcaccgtcgccataaattagcttttcaatcggcgtatcgtagcagcctgatgcgagtcgcccctcagacaatctgtcggcgacaaccacaacctgactgatgttaaagccgccgattttatgcagataacgagatattttctccctaaaatcatcaacctgaggcggcgtgagatcggcgttaaaaaagtccttcaatgcaccactcaggaagccagcggctgacgattcacttaaacgtgccgagatggattcagccatgtgattaagttgcgtcatggctccctgaatccctgatagagaaattcataatcgcgcacgatctgctctggagtcgttgccttaacgatatagtttcccaaggttttgtcggtaaacttgacgcgttgaaaccagcgattaagccagttgttggccttcaggtttcttgcaatgtaggtatcgtagtaatcttttttagcgtctcgaaactcttctttcagccttttactttccagcacgctaagcttcagcttttcatattctttgattaagtttaatactttttggcagaatcggtttttgactcgtttatcgtcatgagtcaatggttctacgttatttaaggcataggaataatcagcaagggcgttggtaaaacggccaaactcgttaaacactttcacatctatccgccagtcgcgaatatccgtaataactttacgaatactgtcaggaatcgtgtcccagatatcctcaaactctgcacaaatatttttggctaaatcggcacagttgattttctcgaaaacaatcggtcccgcaagttttttagcacgctgggttaatacattaagcgctgcggcgcgcccggggctgtttattttaggtacttctaaatagccgcagtgctccggagagaaaagcccggcaacacgtgaagtgtcagggctatcatttcgtcttactctcgataaatgttgacaaaagataccgcgatgatgactttcccagattagccatttccctgcctgtccgggtgacgtagatgtgaattgcctgctgtatcctgccagtcgactacgattctctcccccgcccctgctctatccacagcgccttcatggtccagccgttaggaatattttgcagattgttcaataaattctcggcggcatctgatgaagcaataaactgtgaggcggtagacgaggtcttaaaatagatcacgttgtcactcaaataacggagtattccgttatttttctcgaccaccagctgttgatcttcaggcattcctgatggaacaagccggtactggttgtcggttgcgggtacttttatcccgggaaaaaataggttcctaaggcggtctgttgagcaaccacctcatattgagagtctagcgtctcgcagttgcatacgccgtagtacgcaacatgacgcattctctcatgctgatagatttctgttcttaaccgatgcgtattacccgtgctgagcgtttcttccagcacaggcagagcgtcaatatgcgcctctcgggccatcagcgtcagcaacgatgagctcggattaggcaacagcagttgattaagctcatcaaagcggtaggcccattgcccaccaggcgtcgcaaggatgaaatagagcacatcgtgaaaaggttcgcgccaggccagagtgggtttatattcatcaggaatttcaccaatcgccaacgcattgtttagggctgaaaagaggagccaagggcgtaatcctctattaccactaaggtggtaacgtacccggtcaatggcctgattatgcggcttcagctggcattcgacctcctggagagtcttgtccaaccgggtgagcaccggctcttgctcgctgacggcaatattatcttccagcgtctttttcaacacattcttgatgatgttggcgactgacttgatcccctgctcctcttcgctggcgccaggggcaaaggcatagaggcaaaaagccccatcgagcaccaacggcgctaaatctgcctttatcaaatcttcggcagcgtctttgcagttgccaatcggggtcaggtaaatcaattggctcaataaatagcgaaaccatgaagaaacgggcccctgactttcagaggattcagtgacaacggcatgacgcatcggggcaatggcaggcatagcaatggccgagtactggcgggcaatgatgctatttgccagcgaatcggccacgtttctccagtccgttatttgaacggcagaatgcagactgccttcattctggagataaaactgatagcgcgaatcattgaccgttgcatcgtcaaacagacgtgcaagaaactccttctttccctgagtactaaaaggctggagtagctcgtcgggcaaggttgaatgaacaggaaataccagcggctgtgttgtatcgctctgtgccgggatcagagagataaagtagtgacgcggttcgacctgcgtaccagcacggttgatattcccttcagaggaaagtagaaatccgatatggggacgtgaaagcgacgaatttccctgcgtgtcttccatttggataaactgcagcgttatcccatgcatacgatgcaagttaaccagcatcctggcccggtctaccccgaaaatactttccagcgccagtgcgtaaagtcgctgctgggtatcacgataatatttaaaggccgcaatgctcggtgcatcctcgcccggagccttaagcacctccgtcagcctacgtttggcttcgctatattgaatcaacagtacgctcttgcgcttcagtttattcgcggcgtcctcaatcccgctcatcgtccccgctcccgccgctttgtgcaacgcctcaagatggctgaaatccctgatcaacgcctcgggaacgttattcagaagcaggtcttccccagagaggttagatcgcgtggcgtcagcatactcattttctgcctatcctgaacccgcctgacgccgatattcatcagcagaccggtgctcgacaagcagggcattccttttacgggcgttaagtcacgcaacagcatgaaaggatagtcaaattcaatcagccttagatgccactgcgcaattttgctgactttttccgccgacaggtcatcctgctgtaagcccagcgtccccttcagcgacgaaaagacgcgcgtgataaacgtgtcctgaatgtcctttaaacaggcctccaatcggccataggtcaccggctcaggctgcgtcatcacccccctggcgtgctgatgactggctttaattaattgagaggacggcgaaagataagcatccagctggtcgagtagcagttttgccaatattgcctctccggcaggagacgccgccagcactatttttaattcttcgttatgagcaaacggcgactgcatcagcagcagagaaagagcgtctgtacctctgcagaagagctgtgccacctgtcgtgggtgggatcgtggatcatcagcagaccgcatgcagccacaatggcctccaggctttgttatggctatcactgctaaccgcagcgggtttacgatgaatatattgctcaatgacccgctgtttactctgggaactcaggccttcgacccagaaatagaccttttctatcatctcaagcagactgcgagcttttaccggcggcaacggctcaggaaggcaactgaggcaatcaatctgtgaggtcggcggcgcaaacagcggataacgtcgcccatcttcggcgttaatcttcagcccataaagctgtgcttcacgcacactcgcctgcgagggctcctgttgagcaggcgcgttaggcctcggcaaaaagcccgacggttccttataccgccctttcatcagcgctagcgggccatcgtggatcacgcctcttttatgcacagttttgctcgttgaatgccctctagctgccgccacggcggtaagttaacgctaatttcggccgattgcgcggtgggaaacaccagtggatcgctgagtccgaacgacggcagggacaacaccgacgcggccagcggactggtatctaccgccaccgcatgctcgccggtactgatggcataaattgcccgattttgctgctcggctaagtgcaccgccatttgcactcccgctaacccactcgctatcgaggtctgatttagcggtatctgcgcagagcaaaaattcattggtgaggtgcggacctggccgataaacagtgcagatgaagcgggatccagggtatatctgcggctgccggtagcaccataaagtggctcagtggcgggcaggcccaacaaatgaatttcgtcaaaagagctgcctgcttccagatctgtttctaaaatagagcaatcactttcccaggttggcgtttgcctgtcgctggaggtggcaaagacgtcgcaggacaatccgcacgcgcccgccagataagccgccaatgtttgatgaaaaacgtcgccattttctgccatagcggcatggcccaatgccagactggcggcgtagtaaacgctacaaaaggccgttgccggcccaataaaggtagcgccgggagtccatagccctgttgccaaagaaaatggttgagactggcgagaagcggatgttcgaccgcgtccatttctgcgcaatcttgccactcagtgcgctgctcaaactgacgcaaaaaggaaacggcgagcctgaaagctccatcacccattctccaggcgagtgcactcaatgaagggggacaagaaaaggatgtgggtaacagcgcggtattgcgggcccactcgacgcagcgtgatgctattccgggctagccgtgctgtcagtcaaatggggtacatgctggggcgcggtactgctacaaatagcctgattagtcggcggcatctcccctcccgtccctgaaatttcgtgggtttttatagcagagtaaattactttgaaactctaaaaatacgcttaacgttaccctgaccctaatgacatcatgatgtaaaaaaatgctctcgtgcactgactttgcgttatgctcggcgaagcgtcaattttcaggaaactcagagtgcagatagaacctttaccgccgctcaataccttgattgccttcgaatgcgtggctcgttattgcagcttttcacgcgccgccgatgagctcaacctcacgcaaagcgccatcagtcgccagatactccaacttgaggagatgctggggtgtaaacttttcacccgctcgcagcgtcaggttagcctgacgccgcgtggagaagcctttgccgcagagattcgtaagtcgctgggcgatatctcccactcgaccgccgaggtgatgggctggagcggtctgccacaggtcacgctggcctgtaccagcgccatggggcaactgtggctttcctcacgcctctccagactgcgtgaatcgcttcctgacctgcaaatacgcctgaagatctcagacagcttttcatcactcaagacctcagaattcgacatggcaattttctatttacgcgaagcgcctgaagggtttcacgctgaagcgctgtttgacgagatttgctatccaatgtgttccccgcctttgctaaaacgctgtcggctaatatcaccgccgaggagattatccatcaacggctgcttatccaggacgatcctcagcgtgaatggaccggttggcgtgactggttcaactcacagggcgttcatcactttgcgcctcgtctcacctggcgcgccaatagctacccttttctggtacaggctgcggtacagggcgacggtattttactgggctgggaaggactggttcaggactcgatgcgttcggggcaactggttgccgcacatccaggaaaactggcggcggccggaaaatgctatttattaattcctgaagatagatacgtcagacccataatccgtagagtcagccagtggctgaaagacaatatcgatgagtgccaaatgcagggctgattaattttcaaccaaaacggtcatactaggtcaataaagtataaaactgcgataatttacgctgatgccacgtttttaacctgctcatcaaataacaaaatcccactttcccagcgtgcttagataataaggatccggctgcttatactcttttttaattaatatccaccggcggaattttagttttatcctgaaagcgcctttttctagcggatttcattcccaataaggtaaaaagcagccacattgactgcgaaatgcaggacgcgagattaaagtcatggctcaacgaatacaggccaaacaccccaccgataatattaagataggcataaatatcagcatcaacctctagtttgcgcatttgaaccagcgcataagccagcagatagcaaaacacgccaattaagccgactaccgtgtgcaaatccatgcatcgttcccattttattgtgattcattgcaaggaaaataaaactttttacggtgtcgtgctgcgcaattttcgcatactctcatgataatttttcatacttgtttcagggagagctttgatataactcgttcaggcagataacaaaacccacgatgccatcacttcagaccgggagataatataataatgtttaatgatgatgataaacacctgtcccaattaatccacaacgccagattaagccgtcgcgactttataacccgttccgccgccgttgggttgaccaccgcttacggactttccccgctcaacgcctttgccgcagaacctaaaaaaggggcgtattaaaattggggatgtcaggggtaacaccagcgatacgctcgacccaacattatatagcgattgggtgccgttaaatcaggcttatatgctgatgaacggtctgattgaaatagacgaaaacaataaagccatgccagaacttctcgcctcctgggaagctaaacccggtgccgcagagtggttatttaccctgcgagaaggtgtcactttccataacggcaaaacgctctcagtcgaagatattatttattcaatcaacctgcatcgtggcgataaatcacgaagcgccatcaaaagtcagctggcgccgattactaatattacccaacagaacgataaacaaattcttattaccctttcaggtggcaacgctgatttaccttatttactggccgattaccatctggtggtggtacccgatggcttcaccgactggtcacaccctatcggcaccggcggttatatctttgaccagtacgaacccggcgtgcgctcctatttcaagcgcaatcccaactactggaaaccggatcgtgcctacgtcgacgccgttgaagtcatcgttatcaacgatcctaccgctcgcaccaatgcgctgatttcaggtcaggtgcacgccatcaaccgcgtcgatttcaagaccgtcgatttccttaaacgcagcccgatgctcaacattgtgcgctcttccggtgggcaacactttaccttcctgatggacagtagcgttgccccgtttaaagacaacaatatccgtatggcggtcaaggaaggcattgacaggcagaaaatcctcgacacggtgttgcgcggctatgggcaactgggcaatgaccaccctatcccgaaaaccgatccattctttaaccaccagcttgaacagcgcacctatgacccgacaaatccaagttttatctcaaaaaagccggcctctcggagctcaagctggagctttcgtcctccgacgccgcttttgccggggcgctagacgccgccgcactttaccagcaagaggctcaacagggtggaatacaaattagcatcaagcgccagcctgccgacagttattgggacgacgtgtggatgaaagccccgttctgcatgggctattgggcggacgtcccaccgccgaccagatgttctccacggcctaccagtcaacggccaaatggaacgacactcactggaaaaacgaccagttcgacgccctgcttcttcaggctcgctcgctgctcgacgagagcaaacgcgctgaaatttatggagagcttcagagtatcgtccgtgacgatggtggcgcgatgatcccgctgtttggcgactatctcgacgcggccaacaagaaggtcggcggcattaagccgcatccgatgttcaactttatgggtggccgtttagccgagcgcgtctggctggagggatgatggtacaacgaattttctatcgcgtactgctggggataggcacgctgtggctggtctcggtgctgatatttattggcaccgagatgctgccgggcgatgtcgctaccgccattctcggccaaagtgccacgcctgacaccgtcgcggcgctgcgtttgcagctgggtctggatcaggcgccggtgctgcggtatctgcactggctggcctcggtgctgcacggtgacctggggcactctctcgccaacggtcgtccgattagcgaagagctgctgccgcggctcggcaacacgctgtttctggcggcctatgcggcgattgttgccattccgctggcggtcagcctcggtatcgcctccgctatctggcgcggctcggtgtttgaccgcctcgccaataccctgacgctgctgagcatttcggtgccggagttcttcgtcggctacgtgctggtcatcgtgttcgctatccggctgacctggtttccgagtctggcgatggtagacccgagcaccacgttctcggctcgactgtacgtttgcaccctgccgatgctgacgctcacgctggtggtgctggcacatatgctgcgtatgacccgcgcatcggtcaccgccgtgatgtctagcccgtatatcgagagcgcggtgctgaagggtattccgcgctggcggattgtggtgcagcatgcgctgcctaacgctctcgcgccaattatcaacgtcgtggcctttaatctggcgtatctggtggtgggggttatcctggtcgaggtcgtgttcgtctatccggggattgggcagtacatggtcgatgcggttaccaagcgcgatctgccggtggtacaggcctgcgggctgctgtttggcggtacctacatcctgctcaataccaccgccgatctgctggccatctggtgtaacccgcgcctgcgccacgccagataacctgataaggacctgctattgatgaacagaaagatcaatctacggcgttcttcaggcgccattcccctgtcggcctgggtcgggatcgttattatcgctgtgaacctgctgggcgcgatttttgcgccgtggctcgcgccgcacagtgaaaccgaacaggtgggcgatatctggctgctgccttcgattcatacgccgttcggcaccgacagtctggggcgcgacatgctgtcgcgtattctttacggcgcacgcaccaccattgctatcgccctggcgattaccataagctcatttatcatcggtatcgtgaccggctttgcggcggcgatttacggtaaatgggtggacgtggtgttgtcacgcattgtcgataccctgatgtcgatcccggtgcttatctttgcgctgatggtgctgtcggtcatgggcacctcaatcccggtgctggtgctgactatcgccctgctcgacgcgacccgggtatttcgtctggcccggctggtggcgcaggcgattgtctgtcaggagtacgttgaggccgcccgcctgcgaggtgaaggtttacgctgggtgctgaccaaagagattctacccaacgccatcccgccgctgctggcggagtttgggatgcgtttctgctttaccttcctgtttatcgccggtttgagcttcctcgggcttggcattcagccaccttatgccgactggggcagcatggtgcgcgataacgcgcaggcaattaactttggccagtatgcgccgctgtatccggcggcggcgattgctctgctgactatcggcgtcaatctggtggttgactggctgctggcacgcaacagccttgcacacggagatcagtcatgaaagcgaccacgctcgacattcgcggactgtgcgtcgatacactcgacggctcaccgctggttaaatccgtctctcttcagttggccgcgggcgaagtgctcgggctgattggcgagtccggcgcggggaaatccaccattggactggcggcgttaggttacgcgcgacagggctgtcgcatcagcgccggtgaggttttgctcaacggcaccgatatgatgaaacttgcgtcggctgaaaaacgcctgtggcgcggacgacgcgtcgcctatgtcacgcagagcgccgccgcagcctttaaccccgcgctaacgattgagcgtcaggtctgtgaaggccctattcgccacggcctgatgaacaaacagcagagccgggaatgggcgattacgctgtttcgcgcgctcgacctgccggacccggaaaatatcggccaacgctatccgcaccagctttcagggggacagcttcagcgcgccatggcggcaatggcgatgtcgtgtcagccagatctgctggtcatggacgaacctaccaccgcgctggacgtcaccactcagattgaagtgctggtgatgctgcgcaagctggtgcgcgagttcaacaccgccgctctgtatatcacccacgatttagcggtagtcgcccagctggcggacagaatcatggtattgcgccacggtgaagaggtagaaaccaacaccacggaggcgattctcacgcgtccacggcaggaatacacccagcggctggtggctgaacgcattcacggcatgactgaagaggcaacgcaggtcaacagacagaccgagacgccgctgctgacaattcaacagcttagtacgggttacaacggtaaaaaggtggtagatgaggtcaatcttagcctgccgcgcggtaaaacgctggcgattatcggtgagtccggcagcggcaagagcacgctggcgcgcgcgctggtcggcctgttgccggataccgtcggtcaggtgagtttcgatggtgtgacgttgtcacataaatatgcccagcgcaacaaagagacgctgcgccgcatgcagatgatttaccagctgcctgatgtcgcgctcaacccgcggcaaacactgctggagattatcggcagaccggtcgctttctacttcggcctcaacaaacgtcaggtcagagcccgcgtggaggagctgctgcgcctcaccgaactgccggtcaagcttatcgaccgctatccaggcgaactttcgggaggtcaaaaacagcgggtgtgcattgcccgtgctttagccgccaaccctgagctgattatctgcgacgaggcaacgtcagcgctcgatcccctggtcgccgaggaggtgcttaacctgctgcgcaagctgcaatcccggctggggctttcttacctgttcatcacccatgatctgagcaccgtcaaacgactcgctcatcaggtcgccgtgatgtatcgcggcaagattgtcgccagtggcgacacccatgaggtattcagcccgccaatgcatgaatacaccgaaaagctgctaacctcagtgccggaactgcgcacgggttggctcgatgaagttctcagtctgcgtcagacggcgactaaaaacgtcgcctagaccttgggataaaccgcataccggagcagtatgaaacagataatcagcgaatttccgcacagcgtcacccagatagaacacctgtggttgccgctaagcgacggcactcgtcttgcggtacggctatggttgccggacagcgccgccgaacagccggtaccggccattcttgaatacattccctaccgcaaacgcgacggaacccgcacccgcgacgaaccgatgcacggctatttctcgggaaacggctacgcggtggtgcgggtcgacatgcggggcagcggcgaatcggacgggctgttgaccgatgagtatttgccgcaggagcaggacgacgcgctggaggtgatcgactggattgcctcccaggcgtggtgcagcggcaaggtcggcatgatgggcaaatcctggggaggattcaatgcgttgcaggtcgccgctcgccgccctaaagcgctcaaggcaatcattaccgtctgttcgaccgacgatcgttacaacgacgacattcactacaagggcggctgcctgctgaacgataacctctggtggggcggcatcatgctggcctaccagagccgcccggccgacccggccttagtcggcgacggctggtacaacgagtggctgcatcgcctcgaaaacatgccgttcttcccggcgctgtggatggagcatccgctgcgcgaccgttattggcagcacggttcggtgtgcgaggacgggtcggcgattcagtgcccggtgatggcggtcggcggctgggccgattcttatagcaacgcgattttccgccttatggacaaccttgaggtgccgcgtcgtgccattatcggcccgtgggcgcatgtctatccgcaggacggcacaccagaaccggcgataggcttcctgcaggaggcgctgcaatggtgggaccattggttgaaagacctccctaacgcggcgatggaaggcccgatgattcaggcctggcaacaggacagtcaaccgccttcggctcagcgtcctaccagcaaggggcaatggctcggtttcgacgccgggagcgccagcaacgtccacggtcaacgccgctggctgacgcgtggccaactaaatcttgaacccagtgctctgcccgccacgctttccgtctgctcgccgcaaaaccatgggctgatggccggagaatggatgggggctggcgtgctcggtgaaacgccgccggaccagcgagtcgacgacggtcaggctgaaatcttcgacagcgagccgctcgccgaaccgctgtcaatcttcggctttagccaattcagcgtcgaattgcagagcgataaaccggcagcgatgctctatgttcgcctttccgacgtcgcgccggacggcgcggtcaatcgcgttacccacggttggatgaatctggcacacctggaagggcagcacaaatcggtgccgctggtgcccggccagaaggtcaaggttaacgtgcagctcgatggcatcgcccaccgctttgcggcaggccatcgcctgcgaatttcgcttgccaccacctactggccaatggtctggccaatggccgaggccgccaccttgacgcttgacctgcacagcgcagagcttaccctgccggtgtgcgccgagccggtggtaatagacgggccgaatccgcagcctgaaaccgccgctctgaccccggtcaccctgctgtcgccgggccgcgttgaccgcacgctgagctatgatttcctgcaggacagctggacctcggtcactcacggcgtcggaggcgtgtttggtgaaggggtctatcgtttcgacgatatcgataccacggtcgaccacaacctgcgccgcgagctcagcgtgaacaatagcgacccgctgtcggcccgctatctgttaacacaaaccatgagcatcggccgcgagggctggtggattgaagcggaaatcacgctggagatgcgcagcgacctgacgcactttatcgtcagcggcgatatggtggtcagcctgaacggtgaagaagagttcacaaagtactggcatgagcgcattgcgcgataggcccagacgcataaagcgtatcgggggagtctgaggcaaagaaaaggcagaggaatgaaagttcctctgccctgacaatccccggtaaggggaaagtgtgaagcggtttaaatcagcagactaaacggtacgatactgggcttccgcgtcattgaagcgctgttcgatggaggccgagggtttgcgtcccatcaggctgaacaacacgatggcaacagcagcaaaggcaaaaccgggaatgatttcgtacaggccaaaccaggcgaactgtttccagaccaccacggtcacggcaccgacaatcatgcccgccagcgcaccgttgcgagtcatgcgcggccacaccagtgaaatcaggataaccggtccgaaggcggcgccaaagccggcccacgcatagctcaccagacccagcactttgttctcagggttagaggccagataaattgccacgcccgccaccagcagaaccatgacgcgccctacccacaccagctccttttggctggcctttttacgcaggaaggctttatacaggtcttcggtaatcgcgctcgagctcaccaacagctggcagctcaaggtgctcatcaccgctgccatgatggcggagagcagcacgcccgctatccatggattaaagaggattttcgccagttcgataaagacgcgttcgctgttgcggtcgacattacctgccacgcctggattactggagaagtaggcgataccgaagaagccgactgcgatggtgccagacaggcagaggatcatccaggtcatgctgatacggcgcgcattcttaatggtgtgatgcgagtcggcggccatgaaacgcgccagaatgtgcggctgaccgaagtaaccgagtccccagcctagcagcgagaggatagccaccaggttcaaacctttgaacatgttagtgtattcagggttcttagtgtcgataaccagcatcgaggtgtgcacaccgcccaccgccagaatcacgataattggcgtcaggatcagcgcgaaaatgaccagcgaggcctgcacggtgtcggtccagctgatcgccaggaagccgccaataaaggtgtagaggatggttgccgccgcgccggcaaacagcgcggtgctatagctcatgccgaaggtgctttcaaacaggcgagcaccggccaccacgccagaagcacagtagacggtgaagaacatcaaaatgatcagcgccgagatgatgcgcagcagtttgctcttgtcttcaaagcgatgagtgaaataatccggtaacgtcaacgcgttattattggcctcggtgtgcaccctcaggcggccagcgaccagcttccagttgagataggcaccgatagttaaaccgatagcaatccagctttctgagattcccgaaacaaaaatcgcgccgggcaatcccatgagcaaccagccactcatgtccgatgcgcctgccgacagtgcggtgacgaaactaccgaggctgcggcccccgaggatgtagtcgtcaaagttcttggtgcgcagatacgcaaacaaccctattagaatcatgcccgaaatatagacacaaaatgtcaccaccatgggtgtgttcatcgtcatgcaagttctccatgtatttatatttaattatctatgccgccctaaaaacgtcaggttaccctcccgcgttttcgatggattgccgcgtaatgtactgcgtcatcgtcctgttttgcgttcatacgcctgtttcggcctgaggatactagtggagcatcggttacaggccaagacttttaacgccttcaatacatcttgccaacccgaaaatcacaaagttgtgacgccgggttgcatctttttttcctacccactcttacaaagttgcacccagtgcaaccctcaaattgattaagcaacaatcatgccgttattattttgttaattagatcactaattttaaagtcggcacatttcctgcatttaacttggttgcacaaagttgcaacatggcagatagtagcgaaattattataggttttactgacaaatggagttcccggtaatggcaacaacgactatgggcgtgaagcttgatgaagccacacgtgacagaattaagaccgcagcgcagggcatcgatcgcaccccgcactggcttatcaaacaggctatctactcctatctggagcagctcgagacgggcgctagccttgccgagatagcgggtgcacacgggctgacaacgacgataccgccgtgcccgttgccgttgaacaccagccgttcctcgacttcgcggagcagatccatccacagtcagtgagtcgtgccgccatcaccgcagcataccgtcgcccggagccagaatcggtcgccatgttgctcgaacaggctcgcctgaatgcgcctatggatgccgctgcccacaagctggcctacgacctcgccaatgcactgcggcaccaaaaaagtgcaaacggacgcgccggaatggtgcaaagcctgttgcaggagttctcgctttcttcattagagggcgttgcgctaatgtgcctcgccgaagcgctgctgcgtattcccgacaaaccaacccgtgacgcgttaatccgcgataaaatcagcaacggcaactggcagtcgcaccttggccgtagcccttcactgtttgtgaatgccgctacctggggcctgctgtttaccggccgtctggtcgctacccacaatgaagccaaactctcctcctctctgaaccgcattatcggcaagagcggcgaacctttgattcgcaaaggcgtggacatggcgatgcgcctgatgggcgagcagtttgtgaccggtgagaccattgcacaggcgctggccaatgcccgcaaacatgaagataaaggcttccgctactcctacgacatgctgggtgaagccgcgctaaccgaaaaggacgcgcaggcttatctggtgtcctatgagcaggctattcacgccatcggtaaagcctcgaacggtcgcggtatttatgaaggtccagggatctccatcaaactttctgcgctgcatccgcgctacagccgcgcgcagtacgagcgcgtaatggaagagctttacccgcgccttctggccctgactttgcaggcacgtaaatacgacatcggcatcaatatcgatgccgaagaagccgatcgtctggaaatctccctcgatttgctggaaaaactgtgcttcgagcctgaactggccggctggaacggcatcgggttcgttattcaggcctatcagaaacgctgcccgatggtcatcgactatctcaccgaactggcgcagcgcagccgtcgccgcctgatgatccgtctggtgaagggcgcatactgggacagcgaaatcaaacgcgctcaggttgacggtctggaagactatccggtctacacccgtaaggtgtacaccgacgtgtcttatctggcctgcgcacgcaaactgctgtctgtgccaaaccttatttatccgcagttcgccacccacaacgcccacacgctggcggcgatttatcagctggcgggcaacaactattatccggggcagtatgagttccagtgcctgcacggcatgggcgaaccgctgtacgaacaggtggtgggtaaagtggccgacggcaaactgaaccgcccttgccgcatctatgccccggtcggtacccatgaaacgctgctggcatacctggtgcgtcgcctgctggaaaacggtgccaatacctccttcgttaaccgcatcgccgacgccacgctgccgctcgacgagctggtggctgacccggtcaaggccgtggaacagctggccgccgaagagggtcaggttggcctgccgcatccgcgtatcgcgctaccgcgcaatctgtatggcgcaaaacgcgctaactctgcgggtctggatatgtcaaacgaacaccgtctggcgtccctttccagcgccttgttggcaagcgccgcgcatccgctgcgcgcggagcctatgctgggcgaaaaactggctgaagaccgtctgaccgacgtgaccttcgacaacgtggtcaacccggccgagccgagcgacgtagtaggtcaggtacgcgaaaccaccgaggcagaaattagcctggcgctcgactgcgcgactcacgcaggcgctatctggttcgcgacgccgcctgaagaacgtgcggctatcctgcaacgcgccgccgaactgatggaatcacagatgcagaacctgctgggtgtgctggtgcgtgaggcgggcaaaacctttaacaacgccatcgccgaggtgcgtgaagcggtcgacttcctgcactattacgccggtcagattgaacaagcgttcagcaacgacagccaccgtccgcttggcccggtggtctgtatcagtccgtggaacttcccgctggctatctttaccggacaaatcgccgctgcgcttgccgccggtaacagtgtactggccaaaccggccgaacaaacgccgctggttgccgccgaagcggtgcgcatcctgcttgaggccggtgtccctgcgggcgtgttgcagctgttgccgggccggggtgaaaccgtcggtgccgctctggttaacgacgaacgcgtgcacggcgtcctgtttaccggttcaaccgacgttgcgggtattctgcaacgcaatatcgccggtcgtcttgactcgcaggggcgtccgacgccgctgattgccgaaaccggcggtctgaatgcgatgatagtcgactcctctgctctgaccgaacaggtggtgaccgacgtggtcgcctcagcattcgacagtgccggtcagcgctgttccgccctgcgcgtgctgtgtattcaggaagacgttgccgaccacacgcttcaaatgctgcgcggcgcgatggccgaatgccgcatgggcaatccggaacgtctctctaccgatatcggtccggttatcgacgccgaagcgaaagccaatatcgagaatcatatcgaagcgctgcgcgccaaaggccgcaaggtgtatcaggccgcgcagaacaataccgacgacagcaaggagtggtcacgcggtacctttattaagccgacgctgattgagctggacagcttcgatgagatgaagaaagagatcttcggaccggtgctgcacgtggtgcgctattcacgtcagaacctcgacgcattaatcgatcagattaacgaagcaggctacggcctgacgctgggtatccacacccgcatcgacgagactattcagcgcgtgacgatgcgtgccaaggttggcaacctgtacgtcaaccgtaatatggtcggcgcggtcgtgggcgtacagccgttcggcggcgaaggcctgtcagggaccgggccgaaagccgggggtccgctgtatctttatcgcctgctggcaagccgtcctgacgaggcggtcaacgccctgctcaacggcaacgacaatccgatgccactcgacgccaccgtgcgcgagtctctgctggtcccgcaccaggcattaaccgagtgggcggccaaagacgagccaggtatcgcgaccgtttgtggcgagttcgccgagtggagtcagggcggtacgctgcgtacacttcctggcccgaccggtgaacgtaatacctacgccctgctgccacgcgagcgcgtactggcgctggccgacaacgcgcacgacgcgttgattcagctggccgcggcaacggccaccggctgccgcatactgtggcctgaagcgaccgtacagcgcgagctgttcaagcgtctgcctaaagcggttcaggagcgcatcgactttgccgccgactggcagagcagtaatctggcgttcgacgcggtgatttaccacggtgacgcggatcagctgcgtgacctgtgtcagacgttggcgaaacgttcaggccctatcgtgtcggtgcagggttttgcgcgcggcgagaccaatctgctgcttgagcgtctgctgattgaacgctcgctctccgtcaacaccgcggcggcaggcggtaacgccagcctgatgactatcggttaattaatacggtaacaggcaacgcctactctttaggcaatatcgacggctacgggttctatcttttgtgatagagcccgttttttttatagtgaattagttaaaagtttaatccacactgtttctgtgacaaaggcaggtttaagcagcgtttatgcgtgcgttattaccgaggcaaaaggctatcaaatccatagagtaattcaggtatgacttatcaatgcccgcgtatagggtagaggtgagaattaattaaaaggagtatacctatgagcaatcctattgatgatgcagataatactgcaaaacctattgttgaagcagaccgagaagctggagcagatgttggtaaatgtccttttcatcacgcgattaaaaacgaaactgcaggcggcgggactcataatcgagactggtggcctaatcagttaagagttgacctgctgaatcagcattccaaccgttcaaaccctctgggcgaagatttcaactatcgccacgaattctccaaactagactactccgcgcttaagtctgacctgcgcgccctgctcaccgagtcgcagccgtggtggcctgccgactggggaacctacatcgggttgtttattcgtatggcctggcacagcgcgggcacctatcgttccgtggatggacgcggcggttccggtcgcggccagcagcgttttgcgccactaaactcttggcctgataacgtgagcctcgacaaggcacgtcgcctactgtggccggttaaacaaaaatacggtcagaaaatttcttgggctgacctgtatattcttgccggtaacgtagccctcgaaaactccggtttccgcacctttggctttggtgccggacgcgaagacgtctgggaaccggatcttgacgttaactggggtgatgaaaaaacctggctggaacatcgtcatcctgaagcactggccaagtctccgctcggcgcaaccgaaatggggcttatctacgtcaacccggaaggcccaaatcacagcggtgaccctgcctctgcggccccggccatccgtgccactttcggcaatatggcatgaacgatgaagagattgtcgcgctgattgccgggggacatacgctgggcaaaacccacggtgccggtcctgcagaccacgttggcgttgatccagaaaccgcgccgctggaaacccagggtctgggttgggtcagcagttatggaaacggcgcgggcgcggatgccataacctcgggtctggaagttatctggtcgcagacgccgacgcagtggagccactatttcttcgaaaacctgttcaaatatgagtgggtgcaaacccgtagcccggcaggcgccattcagtttgaagcctccgatgctggcgacattattcccgatccgtttgatagctcgaaaaaacgcaaaccgaccatgctggttaccgacctgacgctgcgccacgaccctgaatttgagaaaatatcgcgtcgtttcctcaatgacccgcaggcgtttaatgaagcttttgcccgcgcctggtacaaactgacccaccgagacatggggccgaaagcgcgttatatcggacccgaagtaccaaaagaagacctgatttggcaagacccactgccgcagccggtttataacccgacgacggccgacgttgcctacctcaaagagaagattgctgctgctggcctgagcgtgagtgagctgatttcggtggcctgggcttcggcctcaaccttccgcggtggcgacaaacgcggtggcgctaacggcgcacgcctcgcgctgttgccgcaaagagattgggaagttaacgccattgccgctcgcgtgctgccaacgctggaaactattcagcaggagtacaacaaggcttccttagccgatgtgatcgtgctggcaggcgtggtgggcgtagagcaggcggcaaaagcggctaacgtcagcattgacgtgcccttcacgccgggccgtgtcgatgccagtcagagtcagactgacattgagtcgtttgaatggctacagccgaaggccgacggtttccgcaattatcgcggcgttgaaagctccaccccaacggaaagcttgcttatcgacaaggctcagcagctgacgctgactgcgccagagttaaccgtactgatcgggggtttaagagccttgggtgccaattttgacggcagccatcacggcatctttaccgataaagtcggtgaacttaacgccgacttcttcgtgaatttgctggatatgcgctatgagtggaagcctgtcgatgctacgggagaaatcttcgaaggcgagaccgtgcaagtggtgaaacacgatttaccgccacccgcgccgatttggtgtttggctcgaacgccatactgcgtgccaacgccgaggtttacgccagcgtcgatgccaaagagaagtttgttaaagacttcgttgccgcctggaccaaagtgatgaatctggaccgcttcgatctttaacgcagtctgaagtgatatagccggcacagacggtcagaattgactgaatgtgccggttttttttgccgcacgacgggccgcttagctaaacaatactctaattttgcaggaatttttccaggaactgttttgtccgttcgtgcttcggcgcagagaacaattctcttgctggaccctgctcgacaatcttgccttgatccataaagatggcgcgatcggccacgtcgcgagcaaagctcatctcgtgggtgacgataaccatggttcgatgctcctgagccaacgccttaatggtgttaagcacctcgcccaccagctcagggtcaagcgccgacgtcggttcatcaaacaggataacctctggattcatcgccaacgcacgggcaattgccacgcgctgctgctgtccgccagagagacgacgcggataggcgctctctttgcccgacaacccgaccttggccaacagcttgcgtgcctcggcctcggcctgggcacgcggctcgcccttcacaatcaccggaccttcgataatgttctcgagcaccgagcggtgcgggaacaggttaaagttctggaacacaaaccccacctgctgacgaagcttacgcaccttttctttctgtttactgataggcacgctggcgtcaatttcaatattacccacggtaatcgtgccggagtccggtatttccagcaggttaatgctgcgcagaagcgtggttttccccgagccgctcggcccaataatcgccacgacctccccggcgttcacctgtaggtcaataccgtgtagcaccgtctgaccatggaactttttaaccagcttgttcacgtcaatggtactcatgatggctcctgatcctgacggttaacgcggtcttccaaacggttttgcaggaaggacagcacggtagcaagcacccagtaaatcaccgaggcggcaagatacatggtgaacacttccagcgtgcgcgaggtcaccagctgcgcctgacgaaacagctccggcacctgaatggtcgccgccagcgaggtgtctttcaccaggccaataaagctgttgccaagcggcggcagcgcagtgcgggcagcctgaggcagaaccacgcgacgcagcgtctgccacgaattcatgccgatactggccgccgcttcccactgtcctttatcgatagaggagatggccgcacgcagcgtctcagaggtgtaggccgccgtattaagcgacaggccaatcattgccgaaggaatcgggtcaagttcgatgccaaactgcggcaaaccgtagtaaatcataaacagctgggcaatcagcggcgtcccgcggaaaatcgacacgtaggcgcgcgacagccatgacaacggccagaaatgcgaaaggcgcatcagcgccagcaggaaccccagtaataaaccaaagaccatcccccgagactcaactcgagggtgaagacggtcccttttaataaaaatggtgctgaatccagcaccagttgtagactctcatgcatcaggtttaaaccttacttggtgacgtcggcaccgaaccacttatcggaaattttcgccagtgagccgtctttctgcatatcggcaatcgccttgttaatagccgcgaccagttcagggttatttttgcggatagccacgccagactcctgacgagagaaaggtttgcccgcaacggccagcgtatcaccggttttcttgaccaagtccagtgccgctaaacggtccaccagaatagcgtcaagacggcctacgcgcagatcctgatatttagttgggtcatcatcataggtacggatatcgacgcccggctcattggcgcgcagccactgctcgtagttactgcccaggcccacaccgactttcttgcttttcaggtcatccggcgtcgagaatttggactcgttaccctttttggtcagcacctgaataccagaaacggtataaggtgtcgaaaagtcgtattttttctcacgctctggagagatagtcacctgattgataaccacatcgatacgtttagagtccagcgccgccagcataccgtcccatttggtcggcgacagcttggctttcacgcccatgtgctgcgccagagaatcggcgaaatcgacctcaaaaccggtcaacttgccgtcatcgccctggaaactgaacggggataggtgccctcaaggccaacaattagcgtaccgcgctgcttgatagtgttaagcaagttttcagaagctgcgaaagaatggctaaccacgcctgctgacagagttaccgccatcgcacccagaagcaaacgacgacgtaatgttgaaaaagccatactcacctcaatgtttgtttttagtttttatgccccgcgagagcatattttcactggaatataatcttaaaagcttatcacttaaaagcataaaattagcttattacatcaataggtaatccgccattttggtaaaaaaattttaaaagcgacaaaatgaggtgattaaagcgacagaacgggggttttatagacagtgaggctattcacgctccagcctgctgatatgcagactcagccaggtcagctcatctttggggagatttagctgatatttttcgagcacataatcccggatagcccaggacaccgccatcgcggtcggatgatggcgcagcagctcctggtaaaagtcttccgtctctccgccggtgattttgccgttaaggatccgctcggcgaaataacgcagatgtgtgataaaccgcgcataattgatggattcaatgtcgatatttttattgagcttgtagcgcacaatttcggcaatgcgattgaccagctcaacctgctgatgcgcagtggcattatcagacttgctgctgccgttaataagatgaaaggcgatattcaccgcctcatcggcgggaagcgcaaccttgaatcggtcctcaaccagggtcttggcctgtaaccctatctcgtactctttctgatagtagcgtttaatctcccaacttagcttattaatcaacgggttatcttgctggcttcgctcaaccgcaaaataaagatgctcggtcagcgtaaaaaatagcactgagttaagcttctcggtataacggtgctgggcaagctgaataatgtcatgggtgagatcaaaaaaggccgcagggatactgctggtcagcgataaaaaatgtcgagatttcaaatcctgtaacggtataaacaccttctcgacgtgcgcaatatcaatcaaggtacccggtttggcgttgaatcccagtcctttgccaaacagcaccatttcctgctgctcttgttctaccagcagcatactgttattgagcgatttttttactgtaatcacgtgttttccctgcggcaaccttagcctttagtccatctgcgcgccgttgctggcgatgactttctgataccagtaaaacgagtctttcttaagacgtgccagcgatcctttgccctcatcgtcctgatcgacatagataaaaccatagcgcttagacatttgcgaggttccggcgctaataatgtcgatagcccccaggtggtgaagcccatcacctccacgccttcgtcaattgccgccttgacctgctcgaagtgcgcgcggaaatagtcgatgcgatagctatcctgtacctttccctcaaccacttcgtctttggcgccgaggccattctcaacgataaacagcggtttctggtaacggtcgtagagttcgagcagcgatatttttaaccccagcggatcgatctgccagccccattccgacgccgccagataagggtttttcacgccgagtatcgtattgcctgggatacgttcggcctcaggatcggtggattcggtcatcgacatgtaatagctgaatgacacgaagtcgacggtgtaggacttaagaatatccaggtcgcccggctgtatctcaagatgaatattgcgacgcgccaaatcacgcttgatcaacggcggatactctccgaatacctgcacgtcggcgtagaacagattttcgaggttctttttcagcgtcgcttcgacgtcttccggtttgcaggtgcgcggataagtggtgagtttggtcaacatacagcccacctgactgcccggaataatggcgtggcagtcgcgggtcaccagcgctgaggcgacaaactggtgatgaagcccctgataaatatcctgctcggccttacccgcggcgcttttctctttgcgaataccggcggtggtaaacgggtgtcggtgaatgctgtcgatttcgttaaaggtcagccagtaacgcaccagacctttatagcgctcgaagcacacctggctgaagcgcacaaaggcatctaccaccttgcgatgcacccaaccgttgtatttctcgctaagaatcaacggcatttcatagtgtgacaacgtcactaatggctcaatattcagtctgcgcatctcggtaaacaggtcatgataaaacgtcagcccttcctcgttaggcgcagcgtcctcaccggtagggaaaatgcgcgaccaggcaatcgatacgcgcagcaccttacagcccatttcggcaaacagcgccaggtcttcctgatagcggtgataaaaatcgataccacgacgtttcggataatttgcgtcattgcggccgctgagcgcatcggcgatattctcatcgctgagcgccatgtgcgcactgtagtccttgacggataccttgggtttccaggcgacagcgtcggccaccgaggggcctttaccgccgatattccatgccccttcagcctgattggcagcgatagcaccgcccataaaaagtcttcaggaaacgttgatatgttgctcattacacggactcctttaagctcatgacaatttgacagtcgttaatgtgtttcgcggcaggtagccgctccagcgtaaagcgttcactgttggtgataaccatgatgaccaccggatcaaaaccggctcgtttgacggcctcgagatcgaattccaccagcgtatcgccgagcacgacccgctgaccggcctgcactttggcgaagaatccctgcccgttcagtttgatggtgtcgatgccgatatgaaaaatcagctccacgcccccgtcggtcaacatgctgaccgcatgcccggtgtcgaaaacgttgacgataaccccctccgctggcgcactcagtacgccctgctggggaataatcgcgataccttcccccataatgcgggctgaaaaaacctcgtcattaacctgctccagcgggataacctgcccctggatcggttgagccagaaaaagcccgcccacggcctgaacaaccgccggcgttttttcacgccacagcaccagtgcgcagataaaggagactaaaaacgacagtgcggttccggccagcgcatagacgatgttcatgccgctgtcgggtgaaacaaacatcgagatggtcgccagccccggcccaccagcgcgaaagcctgcaccccagccagccgataaacgcaccgccgacgaaactgcccgccagcacgctgtataacgcctgtttatgcagcagcgtcaccccataaatcgccggttcggtaatgccaaacagcgcggagattccggcagagaaggcggtggatttgatggttttatctttgctcttcagcgcaatggcgaaacacgcgcccgattcggcaatgttgtgcgccagggacgccggaagatacagcacctcgcggccaaactgactcatcgaggcaatggcataaggcaacatcggtttatgcatgcccgcggcgaccataaacggcagcgcggtcgccagcagcgcggtcgcaataaaccccagatggccataaagccagagaataacgctggccaaccctgcgcccagctcatagccgaagggccaagcagcagcagcgtgacgggtacagtgaccagcagtgaaagcatcggcgaaaggaaaatacgcaccgacgcgggtgaataccgattgaaaaacttctccgtttgcgcataaaacagcacgcacagaatggctggaaacacctgcgaggcataggcgacattttttagcgccagcgagaaaaactctgcccctccgccaggtgcttcgccatattgggcaacaccatcaccgacacggcagacaccgccaccagcacgttaacctttaatttggtggccgtcgtaatcgccaccagaatcggcaagaaatagattggcgcagagccgatattatccaacaccttccaggttgagctactgcggctcagccaaccgaaggcgtcaagaagcaacagcagcgactttaacaccccgccaccggcaatcgcgggcaccaaaggttgaaagacgctgatgacaaaatccacggcgcgcgccagcggtttggttttgttttttttcacccgctctgaaggctccgccgcgctaacttgctgctgcaccgcctcaaaaatcgcgatcacctcacggccaatcaccacctgacactgcacgttcaatcgaacgcccagtacgccgggcactttttcgagtgcgcgtttgtcgactttatcgttgtcatagagactcagacgcaggcgcgtagagcagtgctcaacgtgttcaatattctctgctccgccgacgctttgcacgatttcctgcgcagtttttaagtagtccatcgccagctccccctagtcgaatccaaaaaaaagacctgaagcccatcacctcgctcgagaggatggggcttcaggtcttgcctacttacgtagtaacacgcctttgttacgttatcgggttattgacccggcttcgtcaaactaaatgactaaagcaaagtgaaaactgtgagccaacctgcaacctactccacgatggagaccttagcggcagcgcattgagcctatctcacccaaaaaaatatttagaaacacattagcccaatttctagtcataaatagcattacctatgtagtatagccaatgctatattagcgaacagaggataacctaacccaataacgacccataacaaaccggggtggctatgagtgagatgagtaaaaattctacgttaacagaacgcaccaacgaggcgataggcgaagcactttccgggcgtaaaagcgggatgatgacgccactgctgttcgtcggccccgcggttatcgcctccatcgcctatatggatcccggtaactttgctaccaatattcaggcaggctcaaaattcggctacagcctgctgtgggtggtggtgatggctaacctgatagccatgctttttcaggcgttgtcggccaaactcgggattgtcacgcgtaaaaatctggccgaaatgtgccgtgaccaacttcctcctccgtggtctgggggatgtgggcagtgagcgaaattgccgcgatggcgaccgaccttgccgagttcctgggtggcgcattagccctttcgctgttgtttagcatgccattgctggccgggatgggcgtcaccgccgtcattacctatgctttgctgatggttgaaaagcgcggttttcgccccgtagagctgatgattggcggcctggtagccgttatcgcgctctgctatctggtgcagatgttcatcgtgcccgtggactgggcggccgcagggatggggatgctggtccccaaattgcccaacgccgaggcgctgaccatttctgtcggtattattggggcgaccgtgatgccgcacgccatttttctacattcagggctgacgcagcatcgaacgttggttaaaaacccggccgagcggcgcaaacttttgcgtttctccaacatcgaggtggtggttgcactgtcaattgccggactggtgaacatcgccatggtcatcatggcctcaagcgcgtttcatgccggtcacagcgacgtcgccgaaattgaaaccgcttatcataccctgacgccgctgctggggattgccgccgccggggtgttcctgctgtcgttgattgcctcggggatttcgagctcggtggtcggcaccatggccggtcagatgatcatgcagggctttgtcggtttccgtattcctatctggctgcgacgtctggtcaccatggtaccggcatttatcgtcgtcgcaatgggggttaacgcaaccgatgcgctggtttacagtcaggtcgtcctgagtctggcgctgcctgctccgatgattgcgttggtgatgtttacccgccgccgcgacatcatggcgaatttgtgaatagccgtctgaccaccgtttcttcgattgtcgggacagtggtcattgtggcgctcaacgtggtgctgttgttgcagattgccggtgtgcagataccaggctttgcatgattaacgcgtgaatagaagaacagcctgcggcccggtcttaaacgaccgagccacagggcgcagattacttcgcgtaggcgaacagcgcaggcgcgccgccggtgtgcacaaacagaatcgggccatcacccgggaaccgctggcgttccaacccgtcgagcaggcctgccatggttttaccggtataaaccggatccagcagcatcgcttccttttcggccagcagcttgatagccgccagcccttcctggttcggctcgccgtagcgcggtgcgaaatactcgtcccacagttcaatttctggcgtttcgccttccagctcaagcagttgcatcagctcattggacagcgtctcaacttttggacgctggtcctccgccttgcgtgacactgtcaccccaatcagcctggtggacggcatcagctcacgcagcgccaccgccagtccggcgtgggtacccgcactgcccgaggccaccaccaccgcgctgaaatcgacaaatccggcagagctttgctcggcgatttcgatagcacactgcacataccccaacgcaccgagggcatttgagccgccgacggggataatgtaaggacggaagccctgcgcttcgagcagcgtggcctgctcttccatctgtgccatcgggtcatacagcgagtcgcacatcacgacttcggtgttaaacaggtccagcagcaggcggttaccgttggtcagataattgtgttcgtcggtacctatcggattttccagaacggccaggcattttagaccgagcttagccgccacggcagcggtttggcgcacatggttagactgaatagcaccggcggtgatcagcgtatctgcgccctcttcgatggccgcagccaccaaaaactccagtttcctcagcttgttaccgcccatcgccaacggcgtgacatcgtcacgttttatgtagatgtcacggccaacgtagtctgaaagacgatttaaacgctctagcggcgtactgttcccgaccagatcaatgcgggaataattctctagctggtgtttcagaatagaaagtgaagatgaatcaggcaaagatgaaggcacggtgttcccccgaagctatgtttttaaactgatgcgttatgttgaccaaatgtcattctactatatcagtgaattagcctctgacattggagacaggcggacaaactaaaaacaggcgtccgaagacgcctgtcgatattaggaataactttatctgcaatcgccgcagggtttcaagcctgcgccatgtaaaaactctctggcgatgtctctttttgccaggcgaggtactgatcgtactttcttagggcaatcctatagttatctgatgcggcgaccggcaaatcatccattattcgctggtgaatgctctccccttgaattttctcaagaggatactcgttggcggccaaaatttcatccagcctgcgcaatcgcaccacatattcacgcaccgtactgtggttcatttctgtctgttcaaagagatactgcttgaaggcaacaatatcgaaataagaagaggtggtattaaatgaaatctcactgcaaaaacggcacagcgccgttaattctttagagagatcgcgccacagctcatcatcaatgggttggtccattttcgcaatcgcgtctttattaatgacttcgccacgaaacaccagggccattctgtctaactctttcccacactgtgaacagttcgtctgactatgtttataatcttttagataacggctcagtggccgtgttttttttcccgctggcataattcacttccaacaaatagtgataattccggatggcctctttgggcctttagttcaaagattttcaatctctcacccagcttaaaccagtcagggatcgtcggacaagtcatgattacgcatttcgcaatcgattacggaaacaattacgctgctaacgtgaaaacggttataaataatccttaacgaaaacaaccccttcaatattaacaatttgttaactttgtaaatgtgtgaacatagtcacttaccaattgattgcaaaatgttaaccgaatagaataccggccattggctagggtttttaatatatcaggggttatcgtgcatttgtggtgggaagtcattaaaacaatttactggggcggtttagcacttgctgcgttgttcactctgttggtgagccgcgacacgattaaaattcgtttgctgacatcaggtattattggattaacctggccgatgagcctgccggtcgtgatgttattctcactgttctaaattgcgataatcggcggtctgctcaggccgccaatcacctctctgtcataatcctcttacacgcggaccaatagcgtcagcacctcatagtgtgcggtatgaggaaacatatcaaatagctgcactcgctcgatgcgataatttttcaactcgcgaatatctttagccattgtctgcgcattacagctggaatataacagcctctccggcgccatattatccagatactgacaaagctcgctgccaattccccgacgcggcggattaactaataccagctcaggcacttgttcattacccgtagcaaagcccgtggagtccagcgccttaaattcaacgtgcttcaacccgagcttttcggccgaaattttggcacagacaatagcctcggcgctgatttcaatcccggtaagacgcgtctctggctttgcgcagtgcagaccaaaccccccacgccgcagaagagatcccacatactcgagatatcgcgttcggccacccagtcacgcgcggtcgcataaagcgcggcggcaacctgcggattggtctggaagaaactctgcggcctgataaacagcggtacctgattaaaatattcttccagcgcctgctggctggtcagggcaatctcacgttcaccctccagaatggccatatgcaccggttggatattggcagacaccacctgtagctcaggcacttgctgcatcagccaaggcaaggccgcgcgcagctgcgtcagcttggtttcggagcgcaggacaaaacgcagcatcaggccgccgttgtgctggctctgcgtcagcagcagatgcttaagctcgccgcgcttgcgcgccacgttatacggcgttagccccgcacgggcaataaaggtcttaagatgccgaaaaacttcgccgaagctggcgggataaagcgggcattcgcagaggtcaaccggcgtaccgtcgcgatgcagcatgccaagaagcgggcgctcaacgctgccgctcaccaccattttggctttattgcgaaacgcctgctcctggcccgccacaggttcgcgccattcgcccacctcaaggccgccgagcaattcggacaggtcgtgctgtttgtcgatgagctgagtggcgtagggtttatccagccactggcaggaccggcaggttccggcggtgtattgtgcgcaatgcataaatgatgaccgttatcgctgttgcgtattctgacagttaaaaagttggcgcgaagtgtaccaccgcacgcggggaaaggctcctttatcacgcccgcgaaaaaggcgtctgccggttctctgaccttagaaccggcagacggactacattcgcgtcgctcgctgacggtctttggcgtgctgtttctcggcgcgatgcataaaccccaggcaatcacgccgataatccctaccaccagcagaatcagcgtcgccagggcgtttatctccgggttggttcctaaacgcacgctggcgaataccagcatcggcagcgtcgtcgaccccggccccgctacaaaactggcaatcaccaaatcatccagcgacagcgtaaacgccagcagccagccggaaaccaacgcaggcgcaatcatcgggatggtgatgataaagaacaccttcagcggcgtggcgccaaggtccatcgctgcctcctcgatggagcggtcaagctcacgcagccgtgccgagaccaccaccgccacgtaggcactgcaaaacgtgacgtgcgccagccagatggtaaacatgccgcgttcgcccggccaacccagcgtatgccccattgccacgaacagcagcaggagcgccagaccggtgataacgtcgggcatcaccagcggtgtggtcagcataaaggcaaacccggtcgatcctttgaatcgaccatagcgcaccatgaccaccgcggccaaggtaccgaccaccaccgccatacttgccgccgcagtcgcgatagtcagactcatgctcacggcgcttatcatcgccgagtcatgaaacagcgccgtataccactgggtcgaccatccggcccatacggtaaccagtttggagctgttaaaagaatagatgaccagtatcagcatggggcatagagaaaggcgaagcccagcaccagaatggcgatgcgccacggcgaacgaaccaccggtaatgaattcatgcgttgtcccccagctctttattctggtacttgtgaaaccagaggataggcactatcagcagcaatagcatcaccacggccaccgccgaggcgaccggccagtcgcggttgttgaagaactcctgccaaagaatacgaccaatcatgatgctgtctggcccgccaagcagctcaggaataacgtactcgcccaccgccggaataaataccagcatcgaaccggcgataatcccacccttggtcagcggcataatcactttcacgaaggttttaaagggcctggcgccgagatccagcgacgcctcgaccagcgaatagtccatgcgggtcagcgcggtataaatcggcaacaccataaacggcagataggaataaacaatgccaatatagaccgccagattggtatgcagaataattaaaggctggtcgataacccccgtccacatcaggaaattgttcagcacgccgttgtctttaaggattgccatccaggcataaacgcggatcaggaaagaggtccacgacggcagaataaccagcagcaacaagatattacgcgtcgccggactgctgtgcgcgaccgcccacgccagcggatagccgatgatcagacacagcagcgttgagatggcggcgacctcgagcgactgcagataagactcgatataaagcgcatccccgacagctgaaggtagttaccaaagtttaaggcgatatccagcacgccgtcggtccaggtcatcaagtcagtatagggcgggattgcccgcgccatatcggcaaagcttatcttcaggacaatcagaaacggtaaggcaaacagcaggataaaccacagcagcggcagcaggatcaccagttttttaccctgcgactgcatcagcctgtcgaaaagcgagcgtgatttaccggcaggcgtcgcctcggaactctttgttatcatagtcatggttattctcccgccctaaacggtcaacacgacgcagctgtcggcttcccagcaaagacgcacttcatcgccccaggtcggcatccctttgcggaaacggtgaccgttctgcaactgggcggtaatcaattgcccgctgtgcagcctgacgtgataaatcgacaggtcgcccagataggcgatattcaccacctcgccaactgcaaagttgcatccgtcggccgggaccgcctcacagagcatgattttttcgggacgcagcgccacaaacgtcggcacgccgtcgctgacggcggcgtctgcggccaccttcaacgggtgcaccagccccggactacggagggttatcgcgtcgtcttcgcgggactccagcaggccttcaaacacgttaaccgagccaataaattcggcgctgaagcggctgtttgggtgctcataaatctcttccggctcaccaatctgcacaaacttgccgcgattcataatcgcaatgcgccccgccatggtcatcgcctcttcctgatcgtgggtgaccatcacgcaggtcgcgccgactcgctcgagaatatcgaccacttcgagctgcatacggtcgcgcagctttttgtccaacgcgcccatcggctcgtcgagcagcagcagcttcggccgttttgccaggcttcgcgccagcgccacgcgctgacgctgaccgcctgaaagctgatgcggtttgcgcctggcgaactcttccatatgtaccagcgttagcatctccgccacgcgggccttgatttcggcggacggcagtttgtcctgcttgaggccaaaggcgatattctgttcaaccgtcatatggggaacagcgcgtaagactggaacatcatattgataggacgctgatacggcggtacctgcgacaggtcctgcccgtcgagcacgatttcgcccttggtcggcgactcgaaaccggccagcatgcgcagcagcgttgacttgccgcaccccgacgcgccaagcagcgcgaaaatctcgcccttgaagatggttagactgacatcgtcgacggcaagctggccgtcaaaagacttggacaaattgcgaatttccaacagaggagtaaaacctgtgcggactttttcgcccgaaaatcgctcgcctgcatgttgcggctgagggcgtggaataacgtcattcactcagtgatgcctccgtcagaagcgggtcaggataatttaagcataacagcccgctcagataacgccgggccgattgcgaacttaggtaatgaaatcagagctcactcaataaaacgacgcggcccgtcgtgttgcccggagccgcgttgaacttaccgctcctcatcagataaatatcaggaattaatcctgaaaaaatcaggggagcggcctgatgcgagattatttaccgctttgcactttggtccaagagcgggtgatcagacggtcaatcttcggatcctgaactttcagggtgaagagcttggcgcgcacatcggtcggtggatagatgcttggattattgcggatttctggcttgactagcggggttgccgccgcattgccgttagcgtaaaacaccgcattactgataccggccatcacctcaggcttcatcagatagttgaggaactgatacgcctcgtcggtgttttttgcatcggctggcatcgcgaacacgtcgaagaacgccagcgctccctctttaggaatgctgtaggcgatatttacgccgtttttcgcctcttttgcgcggtttgaagcctgaatgacgtcacccgcccaacccacggccacgcaaatatcgccgttcgccaggtcattgatgtattgagaagagtggaagtagcggatgcttggacgtagcttgagcagcaggtcggtcgcagccgcgtagtcttcaggtttagtgctgttcgggtcgaggtgcaaatagttcaacaccgaggcgtagatttcggccggagcgtcgaggaatgaaacgccgcagcccttcagcttggcgagattgtctgggtttaataccagatcccagctgttaaccggcgcgtctttaccgagcgcggcctttactttatcgacgttgtagccgatgccagtggtcgcccacaggtaaggaatagcgtatttgttacccggatcgtgctgtgccaccatctttagcagttctgggtcgaggtttttatagtttggcagtttgctcttgtcgagcggcttaaacacgcccgcagagatttggcgttcgaggaaactcgccgaaggcaccaccagatcaaagccggtgctccctgccatcagcttgccttccagcacctcgttggagtcgaagacgtcatagactaccttgatgccggtttccttttggaagttagcgacggtgtctggcgcaatataatctgaccagttatagatatgcagcgttttatcttccgcagacgcggcgactgacgcagccatcgccacacccgcgatgacgcctgacaaccactttttacgcagggtaaacatccgttattacctccaacaggggtgataaaaataaaaggactctggtcgtcgcgcctgtctgcaggatgctatctgtaaacccgcagtggttataaaacaggtcaaataaccagtaattaagtagatgagtaaatactttaccgatctgaatatttttgttgcctaccctggcattgagacggtgcataggcatgcaccttgtctgctgcatcaccgatgaaataatcgtttggcttttcaaggtatccgacgattagtacacaatgggcagcataacgccgtgatcaaaatcacaccatacctgttgaaaaaaaacaccattcatcgattttttatgcaattttgtctatggcgtgtggcattcatgtccatacaaagggaaatgacccgcaacaatgcgcaatatttagcataatgttttttgaaacatagcaaagctagcgcagccatcggaatggctgcgcgggttaagaattcatcagaagtaaaatctggctggcggggagtgtctttgagcgggcgaacgttaggcccgttaatgattaatgcagcagcgggatattcacactgaccggtggcgctgattcatcgtcatcgcccaaaaacagcagatcgttggcatgtgcctcaaggattatcatcgacatctgctcttcgccctgctgaaggaaatgcgcaaactggtcgagggtaatgccgacaaccccgctgatcgactgacagacgattagcttcggcagattgtcgtcttggatatcgacaaaagcctttacggtcaacgagctggcattgatttggctcagatcggcaaccagcgggataagcgcagtcggtttaacttcggcaagcgcagagaacaggataacgccgtcaaccaggtcaaccttggcatcaaaaacgccgtcaaaattctgcatatgcggcaaatgaagagcctgacaagaatcacactcgaaaaaagaaatgcccagctgatcgagccagcgtcgtaataacgccaaatcagggacggtgagtgaatccatataatcagcctcagtgtgtcggtaaagcacgatgatgaatcgtaaaaagatcggaactcgaaaatcactctacgccaattttgcgcagtcagtcattttaagcgaatagttaagtgcgacagcttacggaaatttcccgttgagcgccacgatcaatcctgacattaaccgttattcgcttaaaatatgggtactgccgccacaaaaaggcggcgttgtgtgtttatcgatcgatttacccaccagacttgagtttaaatcccggtttggcgcgctgtacaatgtaatcgatcatcatgcccgcgatgtctaatccggtcgtcgtttcaatcccttcaagtcccggagaggcattgacctccatcaccagcggcccgcgctcggcgcgcagaatatccacgcctgcgacgtcgagacccagcgtgagcgcagccttgatagcgatgtctttttcctgtggcgtaatagtcacattccgcggtgccgccgcgatgcaggttggagcgaaaatcacccggtttggcctggcgttcaatcgcggcgaccacctttttaccgataaccagacagcggatgtctgcaccattggcctcacgaatgtattcctgcaccagaatgtgcgcgttcagaccgcgaaaggcgtcaatcacgctctccgccgcctgccgggtctcggccaataccacaccgatgccctgcgtcccttcgaccagtttcaccaccagcggtgcgccaccgaccagcgctatcagatcggacgtatcgtccggcgaatgagcaaaaccggtaatcggcaggtcaatgccttcacgcgccagaatctgcattgagcgcagcttgtcgcgcgcgcgggtaatggcgaccgattcgtttaatggaaaactgcctaacatctcgaactgccgcagcaccgccgtgccataaaacgtaatcgcggatcctatccttgggataaccgcctgatacttgtccagctgcttcccccgatagtgcacgctcggcgcggcgcagttgatgttcatatagcacgacagcgggtctatcacgtcgatttcatgaccgcgagactcccctgcctctttgaggcgcttgcaggaataaaggctgccgtcacgagaaagtatggcaattttcatcagacactccgttgccgattaacgcgttgcccagccctgcttgtgcagcgcttcaagcataaagggacgctgctcttttttgagcgtacggataatcaggtcgctccagttatcgcggcgtgcgttgctgtcgcgctgggcatagtaatcttccagctctgcgtcgtaggctgccagctggtctttatccagcggctgatagctattttcatgcaccagcatgctctgtggcatacgcggtttgaaggcattaacctgcgccggatgccccacgcaaaagccaaacagcggcatcacgaacttaggcaggttcagcagcgctatcacgtcttcgattctgttgcggataccgccgataaacacgccgcccaacccgagagattcggcagcgaccatcgcattctgcgccattagcgcagtatccacgcagcccagcagcagctgttctgccaggcccagttcggcctgtggattgatttgcaggttacggttgaagtcggcacagaacacccaaaactcggcagcggtagcgacatatttctggccgccggtgtattccaccagcttctcgcgcagttgtgggttggtgatacgaataatggatgagcactgtaagaaactcgacgttgacgcagcctgagctgcgccaataattgcctctctttgctcatcggtcagcgcctggccggtaaaggaacgcacggagctgtgcgcgcgaaggaggtcaatagttggcgtcataatacgaatccttgaaagaatgagatgggtaaaagataaaccctcaagacatcaatgattcatgttcgcagaggcctttgcaagcctcgccgcactaaatgacgtaacggcctgagatgacgttgcctaaggctgcaccattgcgttgtattttcgcgcagataggcacagcacatcaaagcgacaggtaattcctacttttttttctgaaaagagacaggcatagtagccccaagcattgagagctatgcgctaaattgcaaaaaaattctgcgatatcattctcaaatttatcaagtcctgaaattcaggcattttaaaatctaaggagtctccatgtttgcagtaattttcgggcgtcctggctgtccttattgtgttcgtgcaaaagagttggctgaaaaactgactgaagaacgtgatgatttcaatttccgctacgttgatattcatgcggaaggcatcagcaaagccgatttggaaaaaaccgtgggtaagcctgtagaaaccgtgccacagattttcctcgaccagaaacacatcggtggttgcactgattttgaagcttacgcaaaagaaaatctggcgctttatcagcagtaagaacattttttagcgaaagattgagtaaaggccctcctgtaaagaagggcctttttgcgtaacaggcttacatcgtttgaaaacactcagcaggttaatcaaacaactttgtcgattagaaggtaaagctgagctgtgccacagcgccgtaagtacggtctgtgccctttatagccgccacatctacgtgtatcacgccaaaaggtgaaagacccacaccggcggtgagtgcgctaccgctgttcgacatcatgttttggcgataaccggcgcgcagttgtgcccaatcccacgcattaagctctgcccccacgctggcaaattgacgcttttcatctgtagcaaaaccgctggctggcgtgagatcgatatccactgcgctagtaaagaaatcgttgtgccaggcaacacccgtagtcacctgggtgcgcactttaaacgtctctttcaaaccattaacttctttactttccatcatgcgtggcacgatattttgcgcaaccagccccaatgtccagcgatcggtgagataggaggcaaaaccaatgtcactgttaaagtttgactgagtgctaagataatttttggtgcttaaatatttaccggtatagttcttcaacgtcatgttgttgttatataaatcgacacgctggtatttaggcgtaatacctatcgaagacttaacgccattaatttcaaattctttagcaaaagcaatacccacatcagttatcgtggctgcacggcctatcatatgagatgtcagtgcattttcaccggcatcagtgggattaatgctgccatttgcaacaccgtcaagatatttcaggtcacgcccgttgactttgccttctaatgtagcggtaccccaggattttattaccaacgcaaacggcatcacacggctcggcactgctgcaataattccggcactgacttgcccggtcgttttggcattattaaggtccaacaatttgcttttgtattctttggctgtagacgcagatatcctgcccgtcccaagctcatttgcgtaatgctgtcgtgcatctttaacctgtttaaggccgtcttgcatattattaggatcggatacctgagccccgaccgagggtaaaatcagactaaaatcatcactctgaccaaagctggacatcagtgccgggttggccaatggagccgttccataacgggaagaagcaacaccggtacctcccatcgcgtcgttgcgcgcttccatatatgtgcccgctgcatttgcacttccagacagagcaagtagaaccgatagagacataagtgaatactgattagcaaaaaacttcatactttcccttagataacacactatttttagatagagagacgcctttcacgatatattgcgaaaaataaccgtcgtgaaaaaatataatattctccctggcgccatttaatataaagaaagagagactctttattaagaaatatctccaatgcgttttaaattattcaaactagtaagttatttgagccgcactgattccgacacaggtacctgacgcattttctttcagtgcaataataaccaatacatcctatttgacgcattgattcagatcagctgggtgctataagtaataaatagagggaagaataaagccgtaggaatattatcgatatattacaaggtaatataaaccctaatgatgtttattcttgagataatataaataacattaaattttcgaaaataataaaatctgttgaagggtgtaaattcgagggaaagtataaagcgacaattaaccaagatttagaagcagatctgccgacacaaacctgcctctcgctgaagttggccctattggcggcgcgcttgcctgctccagacccaataaagcgtcaccagcataaccccgagcatcgaccaaaataccgcgctggttaaataggcaagttcttcccagtaactgcggatttcaaataagaaatagtgccgaatcagcaggcacagcgggatgcaaatcaccgagccgaggaataaggcaacaaaatgttcaccacggctgacaagacaggcaatgattcccggtagtaagtacaacaacatgcaaaaatcttcctgcggaataactttattaacaggaatgacatgaccttttaacgaaataaaaacaaaaacaaataacacaatgtttatcgcgctggctaaaaagggaaatacccgtctcatgtcctctctccatagttcatcaaccctaaatcttcgggctgtttgttgctatacgtaacaaaagcgaagacaagtaaccctatccataaggctacataactgtttttgctcttaaacaccggctaatactggctgtaagcccgttcaacgactagaatactgcccgtgatttcggataaacagtaactgcgattgagtgcgatccgttggctgcgtgattttcataagtagcatgaaggaatttatctcttgccgttatatatttcaataaattgctggtaaccaaaaagtaatactctgtgaatataaatgtcgctagtttgttaaacggtaactacatccttttactcttcgtggtattggcgttaggcctgtgcctcggaaaagttcgactaggatcggtacagttaggtaattccattggggttttagtcgtttccctgctgcttgggcaacaacatttcacgatcaacaccgaagcactgaatctcggctttatgctgtttatttttgtgtcggtatcgaagcgggtcccaatttcttttcaattttcttccgtgatggcaagaattacctgatgctggcgctggtcatggtcggttccgccatgctgctcgcctttgggctggggcgtttctttggctgggacattggcctgaccgccggtatgctggccggttcgatgacctcgacgccggttctggtgggcgcgggcgataccttacgcaacacgctcggcggcaccaggcttctgggtgcagagctcgacaaccttagcctcggctatgccctaacctatcttatcggtctggtcagcctgatttttggcgcacgctatctgccgaagcttcagcatcaagacctctcgaccagcgcccagcagattgctcgcgaacgtggcctcgacgctgacagtcagcgcaaggtttacctgccggtgattcgcgcctaccgggtgggtcaggagctggtcgcctgggctgacggcaaaaacctgcgtgagctgggtatttatcgccagaccggttgctacatcgagcgtattcgccgcaacggtattctggcgaccccggacggcgacgcggtgctgcaatatggtgatgaaatcgcgctagtgggatacccggacgcgcactcacgccttgaccccagcttccgtaacggtaaagaggtgttcgaccgcgacctgctcgacatgcgcatcgtcaccgaagaagtcgtggtgaagaacaacaacgccgtgggtaaacgcctcagccagttgaatctgaccgaccacggctgcttcctgaatcgcgttatccgcagccagattgagatgcctatcgacgacagcatcgtattgaacaaaggcgacgtgttgcagattagcggcgacgcacgacgggttaaaagcgttgcagaacgtatcgggtttatctcgattcacagccagttaactgacctgctggccttctgcgcattctttatcgtcggcctgatgattgggctgatcaccttccagttcaaaaccatcaccttcggcattggaaacgcggccggcctgctgttcgcgggtatcatgctcggcttcctgcgggccaaccaccctacttttggctatatcccgcagggcgcgttgaacatggtcaaggaatttggcctgatggtgttcatggccggtgtcggcctgagcgcaggcgcgggaatcaaccacgggcttggcgcagttggcggtcaaatgctggtgtcaggactaatagttagcctggtgccggtggttatctgctttatctttggtgcctatgtgctgcgcatgaaccgcgcgctgctgttcggggccatcatgggggcacgcacctgtgcaccggcgatggaaatcatcagtgataccgcacgcagcaacattcctgcgctgggttatgccggtacctacgccatcgctaacgtattgctgacgcttgccggtacgctgatagtgatcatctggccggggtcgtaatttaatctcttgattctaaaggtagttcagagaaagcaataaataattgtattttttttgaactaccgagaactttctcttatggcggtagtcttaactattgccactgcttttcttagaagtccccacgttggagagcccgataatcccgcctgtttaggttcaagattaccgggttttttcttgcctgaaattcaccttcccccaataaaaaacccgcaaatctgcggcttatataaagttgtgcgctgtgtttaggtattagcccgcttcatccaggagttaaccggccgacgggtcttgcatataggtggccttcagttcatcgacataagctaataaacgttgcttcacttcatcattttcttcggtatttatctttttggatacgttgcggagcactttgccagcgtcaacgccacccaggcgggcaaggatttccgagataatcaaaatattcatcttatcgcggcaggactgttcgaattcagcggctgtagtcattttatcttcctgttaaaaatggcaatacctgtgttcccaatcggataagtcttatccaatagtaatgttagccaactatctagatgtcagtcacaaaatttcgtcacttgagataaaaaaacgcctgccgcggctttagcactttcactttaggcggatgttactgttatttatgtttattagaggcgggttcggataacgcgttaagatctgccctcaacgttaattcctttgatttgagagaaccaaggagtgcttgcacgcgacccttctgtccctttagttttgccagttcggacttttcttcctcagagctaggcgacgttttggctcgcttgaggatgttgatgtctgttgttagccttttttccataatcgatgcggctctctgttttattttgatttttctgagattgccagcgatttcaactatcgtctcaagcttctggcccgccgcgacagccggggccactatagtttttatttcattgattttgttattaatcttattgttaagattttcgacgttatcctttttccgaggctgagtgcctttggctgctttaggagccgtggactgggataacgggatgctagcgctcattttgtcgcctgataccggggcttttttcttgccctgatttgtatcaacgctgacaggagcaggcgctgtttcatgcgtacgatgctgcgaatgcgtttcatagttttccggcgtcaccattttaggcacccgctgctgtagggcagtgcaaaactcctcaatctcatccgctttttcaagatagttcagactgtagtcaacctcggtgctatgaggttgagcctcatacttatgctgaacaaaaacctgatctttttcttcaaactcaagcgttcgcacggaatctatctttccttgctcatcagtatggacaaaactcatcgaggatatgttgtgagcatccataaagtttttgatagtctttagatagtgatcgtcgttctgatctgcccgtcgtattaacgcatcgggcatatccatcagcttaatattagaaagatttccgttctcgacagcggttttgacctcatccagcgtcttgttaataagcttgtcaatattgttatggccagatttatctgtattgcttgtcgcagataaatgtgaagggtggattggacttaaagcctgggaagtcaaattgttaattgcggacattatttaattcatccataaacataaaaagtcatgcacagcaaaaggcgcaaagggattttgatgctctattttttggaccttacatccttgtaggccagagaataatctgtttcggggaggggactgtcgaaaatatgcattaattatcggaaatcaacatctggaactacggcctaggaatgataacgaccccacagggtggcaatgacctcagcggtgtcatggcaggcctggagcaccagcttggtgtcctgctggcttttctcgctgcgacagccggctaaatgctgtttgatctgcgtctcgccgccccgcagctgcgcgagcagggtatcgcgaataatcccgcgatcgtcgcggcgtagcactttttccaactcggttaatctggccatcaagcctcctgaaattaaaagttaagcggcacagatatcacctgctgcccgcgcataaaggtcacggtgcggtgagttatcgagtaaattttaaagccgctgggcaacactgccccttgctgtagccgcatgccgttggccagctgcagatacacggattttttgtttcccccacgctaataagcgccgaaggaagaatatgttctgcctgcatcgcggtcggaatattttgataatgcgctttaaggctgaggcgatcgcgacgattaaacgcctcgataatctgcgttattttagcgatgcttttggcgtctttttcaccgctgaccataaactccttaccgacaacggcaatactcagcccttccatcacctcgtttttgtgcagctcatccaccagcagctgaaacagctccgcctggtcattgaccaccacccacttcttcagcagcgttatctcatgcagtcgcatggtggttcgttgccatgccgcatcggacttgattgagccatggatctccacgctgtcaggcgttttaccgctggtgacctctgcgcccagatatccattgaggataagcaattggcgcacccgctggcgcagcgtatcgcccccatgctctcatcgtggaagttaagtccgtgctgccgtaactggtgatgtaaatccttcaggctttgcgacgaggccaccagaccgctaagcctgacggtgccatgggaatcgatatccgccttaagcccggtaaactttgggtcattgagggtctgctttaaccagtgaccggggtcaaacggcggtggaggttgcacagaatgatgcataaacccggcgccaatcaccgccccggcggtgagcaacagccccaatgcggcacctacaggccaggaaagcatctttttgctctcgcttttagcgacctgacgcaccggcagagacggcgcagggagttcgctctcaggttcaccgagcagcaacatctggcctgccaaatcgataacctgccccagcggcagcatttgcgaacagtcccagggtagcccaccgacccagacaggcaccggcggcgcgagcatcacgccctcttcgcttacggtgagcacggtgctaacgccctcttccagcggcaaggcaacgtcgggatcttcaccgctgagacgcgtttctccggcggggaggtctaactctcgcccgccaaaggaccgttcaaccatttaactttataaaaaaactccatgcttgctccggtctcagagttgtgacgaaggctgagccttaatcaaaaacagacgcactgtgctgcgactggttttatcggtagagcggaacaaacttcccaccaacggtaaatctccgagcagcggaatttttctctcgctctctttcacttcgtcctgaataaagccgccaagcagtaagctttgaccggcgcggagcaaggtctgcgtcgagacctcagagttgctcgtttgcggtagaggttcatgttcactaagggcgtccgtatgtttgccatcttggataatcaacttcagcatcatttctgggtgaccgccctggtttatcagacgcggcgtgactctgagcagcgacccggtagtgatcgactcgatcttggccactttttcagaaacaagtttggtgtgaaacgttacgctgcggtccagcaccgcctcggtattgtcgagcgtgacgaccgaaggtcgcgagagcagctgcgccttggcgtttttctccagcgcgctgagcttgaccataaagccgccggtattggtaataatcgaagaaaagctgcttgacgacggcgcgccgctgctgttgaggctgatacctccaccgccgatttgcgtcgacagcgaccagtcgatgcccagcgatttgagctcggttgaatcgacgtccatgatcatcaccgaaatttcgatcagcttcggtttgatatcgaatttcttaatcagcgaggcatacatcggaatattgattttgcggtcacgcacaattaccgcattttgctgaatgtccgccgagaacatcggcagtgaacggtcggcaggctgttgctcgccctgattctctttcagcggcagggtgcgccctgcgccatctctttgagcatgctaacgataccgggtatcactatctgctggccgcgataactgtgggtggtgtcacccgcgctggcgtacttcagcgggaacagctcgatcttttcctgattctggtcgtgattcagcttctgctggtcaatacgtttcgccagcgtctccacgcgagacaggcaaatgggcacgccttcgacctgcatagcgttcgaagacggcagcgcgcgtacctggcaatgtttgttgtcgaggatattgctgccttcaagttgactaatcagctcgctaaccggcagataggtaggcgtaatcagttggctgccgacttcgctggccttatagatgtggatagcctgcccgtcgtaataccaggccagcttgtgcatccgcgcgagttcgtccagcgcctttgaaggcgagacatctttgataacgccaataaaaggctcatcaacctgcgtgctaaccaccacgggaaccccatagttggcccccaaatcgtgtaatacgtcggtgagtttgcttcctcgactggagagaaaaaaggggtcatccccttgccaggggaggctggccaaggcgctaaaatgacacagcatcgaggcgaggcccacggccagtaacaggttttttctcatctctatgctccagaatgtgggtgaaggaggaggcctgatttttcaccaaatctgatcagccagtcagcaatatcctgctgtttactcaatgaagcttcccattcctgagtcgagaacgtggtgcgattaaggcgcagtagaaacaacctttcgctttcaaccaacagggaatcgttaacgcaggtgggaaccgaggcgaaccacagacaaacgcgctggagccagtcgacatcactgacggtcagaccggtatccatcgcgatgcaaacgccctgtggaaaacagctacaccaggcccgctgctccgccacgtcaagtatcagccgatcgctacgcatttttaccacgtggaccgactccagggcggcaagggagtcagggagtttcatatcatctcgattgcattgaaaaagagcggctattttgcggatgtagacgtaatttcggtatcaggtgttgacctgatttattcagccggtgaattgaacagcgaagcttcaagctatttgttatataattctcaatcaaccttccctaaaagatggtaaataatgacagttcgaacggagaataatcccgcgttaaaaagggttctattggtcgaggatcactctttgctcagcgacggcattacccagcttatctcttccctgcctgattacgaggtggtgggcgtggtagtagacggattgaaggtctacgctgcctgtcagcagctgcatcctgacctggtgatacttgatttggggctgcccggcatggacggcaatgatgtgattcatcagctcaagcagcgctgggtggagttaactatcatcgtgctcaccgccgacaacaacgagcaccgcgctaaggccgcactcagcgcgggcgcgatttcctatatcctgaaaagaagtccgcagcagaccctactttcggcactgcaaatggccgccgcagggcgttcctacatcgacccttcgctcgacgagcagcagataatcaaaacagataaattgctggacggtcaggtacgcctgacggtaagagaacgccagattctgaagcttattgccgaaggcagccgcaaccgcgacatcgccgagagcctgaagattaccatcaagacggtagagacccatcgcctgaatctgatgcgcaagctcgatgcccacagcgcggtcgagctcaccaactgggcaatccgcctggggatccacaattgagctttctcagctaaaactttcgcgccgcagcaagtcaatcagcggctgaatacgtgaagaatcaggccaatcccctgctatcacttcctcctcaatcttggcgcagtggtcatgaagcgtcagataaccgcacagcccggcgcagcctttaatcgcatgcaacgactccagcagctgcgtctgctgatacccagccaactctgctcgatgcgattggcgaaggtcttgaaggtctgccagatttcgtcccgtaacttttcgtccacctgcacgtcaatcagcggtttccccaacgaaggattgcgcatcagctcaatgcccgcgtaagctgcagcatgaccacgttctcgatgacctccatgagtttaggcatctgcaatggcttagtgagataaccgtgcatcccactttccatgacccgctcacgctcgctggaaagcgcgtcggcggtcaacgccacgatgggcgtgtcttcgtccagcatgccagactcgggagcgcgccaacgctgtgcggtagtgaaaccgtccatttccggcatgcgcagatccatcaatatcatgtcataaatgccttctcgcccgcagtacagcgcctcctgcccggagtgtgcggcatcaacctgatgcccgaggtcacgcagaattttgctcaatacctcgagattagccgctacgtcgtcaacgattaacaccttcagcgaccacgggctcagaatcagtggtgctgtgctttgctcttcataatcattgccctgcagcagggtagcgaccgttcgccacaaacgccccggaagataggacagtgcatgagacgccagcgcatggttcattccctcaaccggggtcagcccccactcaagcagctgtggatgcagctccgcgggcgcgacgatttcaccgctcaggcgcattttctctccgcgctgcggcccgtccggtaaccaaaaggtaaatctggccccctgacccggctggctggacagcagaatatctccgcccatcgactgcgccaacatcgaggagatagtcagccccagaccgttacctccgctgtgtgcgctaacttgcacgaaaggacggaaaatctgctgatgctggctctcatcaattccctcaccgctgtcctcgatagcgaacaccaaacgctcgtcctgcacctcgacgtgcagcttaacgtagccccgttgggtgaatttaatcgcattgccgagcaggtttatcagaacttgtttaacccgaatgcggctcatcattatttcggctggaatatcattggccacccacgcgctaagcgtcaggcctttttcctcggcccgcaggcgcaccgccatcatgaccttgtccagcagcggcaaaaggggaaccagctcgtaggtcagctcaagcttgccgagctctatctggttgtagtcgagaatattgttgatcagagagaggagatagtcggaggacatagtcgcggtctcaacaagcccctgctgctcggccgtgagttctgaacgctgcaacagcaccaacgcccccacgatgctgttcatcggtgttcgtatctcgtggccaatattagcaatgtgctcgatctttctgaaatgggtctgctcgacgccgcccggtgacacatccacggtctgttttgcccgacgccccagcccttggtaaaaacccagtacgcgctgccacagcagattcttttcgctcacttttttcataattttgaggccccgacgtatttcaaaaggcgaaacagcggcatcacgacgctgaggatggcggttcaggcgttgattcaggtgtttacccgatagtgttgaacaggctctttgccgatgatagccgcagcctgggaagcctccccggtacctttatcaataaattatcagagagaccggatgggattacaaaccgaacggcgactggaacagtttttacagcttgctgacctgccctcaacgcaggtttcgtcgcgaatggaattttccatgccgccctttcagctctacgtcgaatgcctggaagagcacatattattgaccctgagccgagagattgaggatgcctatcagggtactgcattcgttaaatcactgagcgcctgtcatcctgcccgcacccaaggcacgcccatacgcacctggcaactaaaaggaaaacaaatgcttagctgctcaccgggaaaatacagtgacgtgagtcattggctggcctgcctgcaaacaatgcgccgcatgcttgaaattatcgccggaggtcaccgatgaagctcctgcaaaaatggctgcttatcatcgccgcacgtcaggatattatgctagcggccatgctgctgcttgccgtattcatgatgattattcccctgccaacctggctggtggatttcatgattgcgctgaacctgactatctccgttatcctgctgatgatggcactgtacatcagaaatccgctggaatttgcaaccttcccctcagttttgctgattacgacgctgtaccgactggcattgaccatcagtactacgcgtctgattctgcttcaggcggacgccggacagatagtttacaccttcggccagttcgcggtcggcggtaatctcggcgtcgggcttatcgtatttgtaataattaccatcgtgcagtttatcgtcatcaccaaagggtcggagcgtgtggccgaagttggcgcacgtttctcgctcgatgccatgcccggtaagcagatgagtatcgacggtgacatgcgcgccgggaccattgacgccgaagaagcccgtcgcctgcgcggcttggtgcagaaggagagccagctgtacggtgcaatggacggcgcgatgaagttcgtaaaaggtgactccatcgccggtatcatcattattctggtgaatatcttcggcgggaccgccatcggcatcatgtcacacggcatgagcgccagcgaggcgatgtcaacctacgccattctgtcgattggtgacggtctggtcagccagatccccgccctgcttatctccatcaccgccgggataatcgttacccgcgtctccggcgaagagaaactcaatctggccggcgacctcgcccaccagataggctcgcagtcgcaggcgctgaccgtgtcctgtgtggttctgctggtgtttgcgatgatccctggcttcccggctatctactttattatgctggcgcttgggctattcggctgcaccattctggttaaaagacgcagcaagaacaaggccaacggcgcgagcggccctggtgccgacgcgagtggcgaaaatggcacagcgggtggcgctgccatgacccgggcgcaacaccgctgatgattcgcctgtcccccgacctgatgcgctccggcaagtttgcgcctaaggtcgaggctttccgccacaacaaattcgaaaagctgggcattcccttgccggacgttcagctgttccaggacgcctcgctaagcgctggcagcatgcagatcatgctgtatcaggaggcggtgatggtagtcgatataccggatggcctgctgctcgccgacgtctcgacgcagaccctgccgcaggcagaaaaaagcgtgcgcctgccgttcagcctgcaaagtttgcagtgggtctctccaacgcataaagaagccctttcgatgctcggcgttacgctacatgagagcgaggaccggctggttcactgcctgtcgattctggttgaccgctatgccggtgagtttattggcgtgcaggaaacccgcttcctgatggacgcgatggaaggcaaatattctgacctgatcaaagaggttcaacgccagttgccgattggccgcatcgccgacgtgctgcaacggctggtcaccgaaggcgtttcgattcgcgacctgcgcagcattttcgaagcgttgatcgaatgggcgccgcgtgaaaaagacccgatcatgctggtggaatatgtgcgtatcggtctgagacgccatctggtgacccgctttaaagccggtaatccgtggattagctgctggatgattggcgacgtcatagaaagcatgatccgcgaggcgattcgccaaacgtcatctggctcctattcagccctcgattccgagttaaatcaggccattatcgaccgtattcgcgagcagaccggagaagaagaacgccgcactcacgtgttgatgaccgccatcgacatacgtcgcttcctgcgcaaagtcatcgaacgcgagttttataaccttcaggttctctccttccaggagataggcgaagagacggaactgcacgtcgtcggcaatattgacctgataggagaagagtaaaatgcgccttcccgaccgcgaggatatcctcgaacaactgatcgaacgcctgcaactgcccgccgccgacccaaacgccgggcgacaactggccggtaaggtggttgaaatcggtccgacgctgctcaaagcctcgctgccgggcgtcagtctggcagaaatttgtcgccttgaaccttcgggcatcaacgccgaagtcgtggcgatcaacggcgattacgccatgctttcgccttttgccgaaccactgggcgtgaccaccggcagtcgtgtggtccctaccggcagcgtacaccagatagcgctcggcgattttttgttgggccgtattcttgacggcatgggtcagccgctcgacgggtttccgctgccagaaggcggtgaattacgctcctcgaaggcgcggcaccgaaccccttgacccggcaacttattgataccccgctgccgctcggcgtgcgcgccatcgacggcattctgacctgcggcatgggccagcgtatcggcattttcgccgccgcgggcggcggcaagagtactcttctgggcatgatctgcgacggcagtctggcggacgttatcgtgctggcgcttatcggcgaacgtggccgtgaggtccgtgaattcctcgaacataccctgaccgaagaggcgcgagcgcgctgcatcatggtggtgtcgacctccgaccgcccggcgctggaacgtctgaaggcggcctataccgccaccgcgatttccgaatacttccgcgaccgcggcagcaacgtgctgctaatgatggactccctcacccgtttcgcccgcgcctcgcgcgagattggcctggcggcgggcgagcctccggcagcgggcggctatccgccaagcttctttgcccgtcttccgcggctgcttgaacgcgccggaccggcggagtttggcagtattaccgccatttataccgtgctggtagaaggggacaacctcaatgagccggtttccgatgaggtgcgatccatcctcgacggccacatcgtcctgtcccgcaagctggcacaggccaaccactatccggccatcgatatcgccgccagcgtcagtcgaatcatgggtcaagtgacagaacgagatcaccgcgacaacgccggtaaactgcgccgtctgatgtcagcctggcaggagattgagctgctggtccgggtcggcgaatatcaggaaggacaagatgaagaggcggatgaggcaatgcaacgcaaagaggcgattcgcgagtttctatgccagtcgaccactgaaaagaatggctatgaggagacgcttgaacttctatgccaaacactcaactgaccctcaaatccctgctgtccctgaaggtacgccgcgagcgcgggattagaagcgctatcgcccgtctcgacaaacaggtccagcagcttgaaacgcacaaaaccacgctgctgcaaaaccgcagcacgctgtggagcgaatggcggcattgcagcagcagcgagcaaacgctcgggccgctcgaaatacgcgcctatcgcgcccagttgggcaaatattatcagcaggaccacgacctgctggcgcaggtggaagataccgacaacgaagttagccagcggcgggtcgaacaggacaaacaacaacagctgttgcgtcagattttgttgcagcaggaaaaactgaaaatattgatggagtaattgtgtatatatcatcccaggtacaacgcagaaccgtctcggtacaggaaaatgacggcgacagtcactcctccgacgaagaggataagcgccgctttgcctcactgctggcgtcaatttctccacgcgtggttcccgccagcgtaaccagcaggctcggctgttcaagcgggtcggccgggggattcacgctcgccagaggcgcggataccttaatgctcaagcagctgaccctgccgaaatatgcctcgcgcgacgcctggcttagctggcgtctgaccaatggcgctttggcagggctggaaattgaggcacgcagcagcgaaaacggactgtttattcgccttaaagccgtcgatcaccagaagctgatcaggattttaggctccgccaaacgactgcaacagcggctaatccgccagtttgaaaaagacatacaggttgaggttagcgatgaagatcccgcaattaagtaaagaaaccggcagcctggtcgccagggtgggtaacggcctacagtggcttaacgataacggcgaactcatggtgtcataccgccagcgcccggcggtcagcggtcttgtcctccacgccaccttcgacggcgagccgctcacgctgctggtcgacgaagaacagtggtgtcagtgggtgcagccaatgctgacggtgccttctctcgctatgaccccgcctgagtttcgagatttattgagtatctggacgcttgccgacgctggcgaatgctgtgaaaacaacagcatggcgtggccgcagagtgaacggctcgaggcgggcagtgcagcaccgcagatgggatggcacgtttatatccgccgcgaagagcgggagctgggctgttatcttctgtccggcgcagaaaaatgggtctcggcgctgtctgacgaagccttcccggtttcaaatcatgacaccgccactgatatcaaactctgtgtctcgctgctggcgggctggagcaaggtagaaagcagcattctgaatattttaggccccggcgatgcgttaatcctccagcacagctggcaggtggccgacgaccagtacggactctttattgaccgacctatcgcgacattgcgtcaggagcacgagcccaacacttttacccttgaggaaataatgaacgactttgatgactggatggacgtgacgccctccccttcgtttatctcttcgcagagagatacgctgctcaataccacctttgccgtcacggttgaggtggccaaattcgaggtgtcgttgcaagagctcagccagctggacgtcggcggtcaactctccggcaccacgcagtacgacggtctggttacgctcaaggtcggcggactgccgtttgcaaaaggcacgttgctggagattgactctcggctggcggtcagaatcgagagcatttgttaagacaagttagggtctgcacctgatgggccaaggtgggatagcgcgggataataaccgcaatatccctcatcaggatctaaaaatgtctatattagaccaacccctacagctgattattctgctcttcgcgctgtcgatcatgccgctgctgatagtgctcggcacttcctttctgaaaatttcgattgtcttttccctgttgcgaaacgcgctgggtattcagcagatcccgccgaacatcgcgctctatggcttagccttgatcctgagtatgttcatcatggcgccggtcggactcgcgatacaggacaacatcgccgccaatccggtgaagattgaatcaccggcgtttatcgaccagatggaatccgaggtatttgcgccctacaaagagttcctcgaacgcaataccgctccgcagcaggtgcatttcttctctgatatcggccacaaaatctggcccgagaaatatcagaaacgcattcccgacagctccctgctggtgatgatccagcgtttaccgtcagtcagctgattgaggccttcaaaatcggcctgctgctgttcctgccgtttatcgccatcgatctggtggtctccaacgtgctgctggcgatgggcatgatgatggtgtcgccgatgacaatttcgatgccgcttaagctgctgatctttgtcctgatgggaggctgggagaaattgcttggccaactggttctgtcattttcataaacggagaccgagatgagtgaagccatgattacccaactggcggcgcagatgatgtggcttatcctgctgctgtctctgcccgtggtggtggtcgcctcgacggtaggcgtgatggtcagcctgatacaggcgctgactcaggtacaggaacagaccatacagtttctggtgaagctggtggcggtatcgataacgctggcagtgacctatcactggatgggcgatgtgttgctcaattatgccggtctggctttcgaccagataacccagatgcgggaataatatggccaacatgtggacccactggatgcctatcgtaggcatgtgcatgctgcgcccgctcggggtgtttctgctcatgccgctgttcagcagcgctaaccttggcggcgcactcaaccgcagcgccctgctgctggtcatcgctctgccgatgctgccggtttacagcgactggcagtcgcccaccagcgcaatgggctatgtgatgttggccgtcggcgaactgtgcatcggcctgattatcggcttctgcgccgctatcccgttttgggcgctggacatggcgggtttcctgatagacaccatgcgtggctcttccatggccagcgtgctcaacccgatgcttggccagcagtcctcattattcggcatcttctttacccaattattcagcgtgctgtttttgatgagcggcagttttaatgagcttatcgacgctatttatcagtcctacgtcacactgccgcccggcggcacgctcagtttcggcccggacggactggcctttatcggccgccagtggcgcctgatgtacgaactttgcctgcgcttctcgatgcccgccatcgtagtaatcatgctggtggatatggcgatggggctgattaatcgctctgcccagcagcttaacgtcttcttcctggcgatgcctatcaagagcgcctttgcgctgttgatgctggttattagctgtaactttgcctttggtgacctgcgcacctacagcatgcatttttcagaggtcagcgaaaccatgctgagtatcttccgatgagtgaaaaaacagagaagccgacgcacaaaaagatccgcgactcgcgtaagaaaggccaggttgccaagagcgcggaaattaccagcggtatgcagctggtggcggtgctgggctatttcggtaccgaaggaaaggagctgtggcgggcattgcaggagttgcacgaattagccattggcgccgtcaatcagcctttaacctttgggttaggccagcttaccgccgcctttacctcattggcgataaggttcgttggcgggctgggtatgttgctgctgtttatcactatttttaccatcctggcgcaggttgggccgctgctggcgacggaggcactcaagccctcctttaagaaactcaacgtactcgccaatttaaaaaacatgttttcggcaaaaaatctgttcgagttctgcaaatctctgctgaaggtcatgctgctgtcgctgattttcttttatttgctgcgccaaaacgcgccgtcgattcagtttctgccgctgcatccggtcaccaccggacttgaggtctgcgtgcgcctgctgttttggatgctgctgtcgcttatctgtttttatgtggtgattggcatcgctgatatcgcgtttcaaaagtatgacaacaataaaaaaatgatgatgtctcttgaagacataaaacaagagcataaaaactccgaaggtaatcaggagattaagcagaaacgtaaagaagtacaccgagaaattcaaagcggtagcctggcctcgaacgtggccaagtctaccgcggtagtcaaaaacccgacccacgttgccgtctgtcttttttaccatccggaaacctcgccgctgccgaaggtgattgaaatggggcgcgataaacgtgcgctacacatcatccatctggctgaaaaggcaggcattcccgtcgtagaaaacattcaggttgcccgtagcctggccgcaggcacgccggtaggcggctatatccctgccgaactctttgaacccgtagcgcacattttgcgccttgcaatgaaactggattatgacgacgacgatgacgatgattaaaaaaacaaccgctgttttgatttccctgacctgctgtgcactggtcgcaggatgcacccatccctgggctggtttgacgaccagcctgcggcgaaaaaatcggcggcagtgctgtttaaagccaccgatgcgagcaccgcctcgatggcggcgctgaataagttccccaccgtgccccacagcgtcagcgatatgaataacttccccgttgtaccgctaaactggcggatagagggagagcaggatgacgacgcagaagcgcagatggtggctaacattgtgcctatcgcgccgctagaggcgtctcagtctgcgtccccaggcgtctctcgcctgacgcacaacacgcggtatcatccaatgattaaacgggtgtctaacgaagtgggtatcgatgccgacctgcttcacgccatgataaaagtggagtctaactatcaacctcaggcggtgtcccacaagggcgcacgcggactcctgcaggtgatgcccgcgaccggcaaacgtttcggcgtgaccaacctgatggacccggagcacaacctgcgcgccggtgcaacctacatgaaatggctgattgagcactttgacaacgatctgacgctggcgctggcaggctacaacgcgggtgaaggtgcagtgaaaaagtatggccgcgctgtcccgccttataaagaaacccagcactacgtcaagaaggtattgggccattacaaccggttgcaaaacagcaagtctgagcaggaagaagtgctgtcaagcgaggcgacgccggtaagcgaaatcgcggctaataaaaagaccaggaacacccagagtgagaataaagcggataaaagcgacatcgctctcggcgacaaactgttgggcctgctgctttcacagccaaaggcaaccactacggccaataaaaaacacggcacttcagttaatgaacatgccgtgctctagtcaaacaacccatcgtgccgctttgattcaatcgtcatgccacctggattgaatataagcgttatcactgagactgtggcagttttttgctacagtttttattcggataaactagccaagaatccccttcaacttgttgccagttggctccctgagcgatgagcaccgtcgccaaacgctctcgcagcgcggtgacctcggcataaacgctgtgcaacagcatgcctctcacctgacgaatctgcggcacggcgcgttccagctgatggataagcttgataaaacctgccaccgcgcggttgttctgattctctttgctgcgattaacaaaatcacagacgataagctcttcgttttcaaaacggtacaccagctcaaagtcggtatgctgaatgcgcataccgataataaaatcactgttaccgaagcgttcaacctgtggcgtaaagccgttggccgccagatagcgggtgacgacatcggattttactgcggtattgggggttgcggtctgcatttttctttccttcaagagaatacggccgaagccgtattctttgcgcggtggtggaggagaacctgtcttacatgcgaactttatcgagaatggcgctctgcaggcgggtcagttcgccggtcatttccagcatgcggcgtgaggcttcggtggctttatcagccgccgcgctgatagtctgacgaatttgggccgcttgagcctgctgcatatcggctcgcagttcaattttccgggcgtcacgggttatgcccgcggccttcatactcatgccactttcaaaggcttttcccaccccattgaaggtttcggaacctgtctttactgcatctgcaagcttgctaccggcggcaaagcccctgctacaccaaacgcagcggaaatcgacccggtcaccattttcaccgttgcgttcgtcatggcggccttatagtcagtgtcaatcgcctcttttttcaattccagagaggacatttctttattgaaagcgtttttgaacgacgaaccgacgaaatcgcgctggagatctcgaatctcgttgttcatttttttcaacatcatcattacttcgttaagtgtgccaatcacaccttggccgtcgacaacgcttgccgtggaagaggtttctgcggaagaggttaccggtgctgaattagtttgattaatcgttgtcattttataaattccatttaagtttggtggtgcctgcattcccgcaggcgtaagttatttttaaatatcgatcgtgggtaaaacctgtcgccgctaagacaacgggcctttcatgctggcaatgctgtgtgctatttgctccatcgaaccgtcgtcacgactggtcgatgaggagtcggcctgcctcatttgctccattctactcgcggcgcccttacccaacccgcctattatttcatcaagcctgaacaccgctgagtcatcatacgcatgcagagtaatagcattgttcagttggctggcggcatcctgggccatgagcacggtatttttattgcgattcagagcccactgcgttacggcttctgctatttcaccaacctgctcttgaatctttatttcataatgagtattaatgttttgactgcgcaattcataactgagcagggtaatcacagcaaccagcggcagcatttctgcacgaaaattatgctcacgttcacgctgctcaataaacaatttaccgagtaggtccatcacctcaccgcggctcatcggcgcggcagaaaggcggttgcaattggccaactcggccgaaacgtgacggagagccttgctggcaagctctttctcatgtccgctgagcggcggtgaaaagctgcggtcaaaggcctcagctaatttctcgatattcttacccctgcctaattccagcatgactgcgcctaactgtgctttatccagcacgggcaaggagtcggcaaaggcgccggacaatcgagatttacctgttgttattttgtcatttaaagatgccacgccagatggcgtcgtatcgcttaatcgcggactcattgccgttatgctagtcatagagtctccggctttacaccatggatgaggcgatgttgacctgggtagttcccatttggctcatggtctgcaagccttcctcaataatggtgccctggccctgctgtagctctctgattctatccagcgcctttttcttgctgtcgctgtagaggtcgaaaatcatctgattccactgctggtcaacaatcagcaaggaaatatccttttggatcgaggctcgctgcttatctatcaccgccatactcgcttgctgtgtgcccttacagccggcaataagaccttttccgagtgtagtaacgagcggaacactactcatagccttcaattgcgccgtggtacgcatgctggccgtcacagaatgggtagtgattttctggccgcttttgacggcttggttgcccgccttttcaagggtttgcttagccattttttcgaccgcgtcctgactaaagtttttggccatcttgctgcttgccactttcttgaggaatttccccccgtcttgctggtaaaggtaatggcctgcttagacagttgggcagtaatcagctcggcactttctgcggcaatttttttggcaatttgtgtcgctgcaacggaaataatctgtttgctggcttccttagtaccggccttgactccctctgaaatcgcggtgttcataattgcctcaccgccctctttcatgactttttagtgatgttaggaacaattttagccaccagcgcatttctcaccgaactggtcacgtcaactactgcgccggcgatttcaaaccccatctgcacgtagcccgctttttcggccatatcatgatatttatcggcattttcggggtcgacaattgccagggtattcgcgacggccttaaccacaccggcacagcctgccaacagatccattgccccgccgccaccatcatcgggttgccgctcattatgccgccggcaatcttcatgacgccggtcaccacttctacggctgcaacgacccagtcgaaacatacgctgataacggcggctttcttggttttgtcctgcagttcaacattgttggctatttcctctaaacgcgctttgagctgatcggcacgcacttgctcctgtttatcggagaggattttcatcacctcgcatttagaggtcacggtattgcccagaatttcattcgacaacagcgttgaggccatgagcatggaatccatgggcagcgcaacgagagtctccagggtaagatttatgcctgaattacctctatcgtcattacttgccggtggaatattctgctttactctttcaaatgcagcatctgcctccctgcgtgagaccggcgtggcggcggcgcgcggcgtggccaacgacgaggttttcggacagtctgtcgcggcaaacaaggtttcagcgttagtctgcgtttgagtaacggcactgttctttttactgacaacgtctttggaaatggcgctatcgtcggtaagggtattggcactcatcgcgccgttgaggatcatggtcatgatatttcttccttgtatgaggccagcatcctttgtgcgctgccctttatttcctgatactgcggttgtgctccgcaccacatagtgacggcgtttaatgctttgactgcctgctcttcacatcccatgtatcgcaagctgattgcggtaaagaatgcgctacgcgggtcatcaattttaagcgaggctgctcgcgtgaaacaccctatcgcctggccgtggtctttaaggcgctgatggcaaagcccttgcgccagcagatactcaatattccagtggtccagggtgcacagcatgagatacaaatttctcgcggcgctgaaatccccggatgcgaacagctgactcgcatagctttcgatagactgcaggtctttgtcgtcaacgttggacatcatgcgcagcgaacccccgcgcgccaaaaagtactcgaacagttcactgtcgctggcgttctgataatcaaaactattttctaacatcggtcactccttgagatggaactctaatcaggcaggcttcatgcctgccgtgaggcgattagtccaaaaattttaattgtcaggcaaatgaacggcggtgcttcttggcgataggtgcacgcgctggtttctcggcggccgtttcggctttaacctctgcgtttaaggagctggccgctgattttttagccacactcacccccactttctcttcaggaataagctgcttcaattggcgacccaattcgtcaaaggtctttttgaccaccgccaccttttcaaccatcggctgatgaagcggtttatcacccttggtcatcacgtcgctcaattttttcaacttactcatcgcaatcgggcagctgtcggcattttgatagatctggccaatttcaccctgaagagacttaaactcttcaatttgctttttaaaaccgagacgacgtctttgcagcgcatcgatcatgcctttcagttcttccatttgcttcgattcattcatttcttatttcctcaatatattaattcacgggaatgttcgaaccgaaggcacggtttcccgtcacaggctattcgttatcgaattgactgtgcgatcgatttagttgattcaccgttcatgctctgcacggcgttggccatcgctaccgcagtgttaaaactctgcatcagctgttgtaattttaattggctgctttgcacaaagtcggtggcgcgagtggcggttgattcgagtgcacctttaatttcttcaagcgcagctttgtctaatttaggatcctcatattttggtggaaaagtatcagtgagcgcagccttgattttctgaatgtttgcgctatttacactataagactgagtcgtcttgtcatattttaagattgacagagcataggtgtttgcatctttaccctcaaatttaacgcctttaccttccaaataagacaaggcagtataaatatccgtgagatctttacccgatattgtcccacccttatttctagccaagagtttatttaaaaaatcaatttgctcctgaattttctttgattcttctgtcaactcaggggatatttcatttgcttttaaatactcgtcaatattcttacccgcaacaagaatattgttttttttcatatagtcgatgacgtcctgaggcaacttgccgacgtcttcaccgcttgccagcttggcaacaatgccttcaacgcggttggctaaatcggtggcgtcacggcctaccgcggttttgtcctgcatttgcttaaatttaccctgcgcaagctcggtaaacatcagcatcatctcttccatggtcaccatcgcgccacccatcatcgaatggtttttcatcgctttgagatagtcgaggtcgttcttttcattatttgaatcgggtacttcgccagcgctgaatgcgctgatattttcgttagtgatagtggtcataataggtaattccttttaagtgttttaaccgctggcgggatttcccgtccgccaacccattatttattattcgattaattaacgaatcgactgagcaatcgacttagttgattcaccgttcatgctctgcacggcgttggccatcgctaccgcagtgttaaaactctgcatcagctgttgtaattttaattggctactttgcacaaagtcggtggcgcgagtggcggttgattcgagtgcacccttaacttcttccaactcagatttgagtaattgtatcgtcccggcagctgcattaagcctcttttgagccgcttccaactgtttctctgcggcctcaagctctttgggtgtcgaggctttagcaacgttagctttgcaaacgcccacttccttctgacgttcagtaacgttgccttgaagattcgcatgccaggaaatacttttcatatattcgtcaatagatttccctccaacgaggatgttatttttttgcatatattcaataacatccttaggaagatgatccatagaatcaccgtctttcagtttggcaataatcccttcaacgcggtttgccatatcggtggcgtcacggcctaccgcggttttgtcctgcatttgcttaaatttaccctgcgcaagctcggtaaacatcagcatcatctcttccatggtcaccatcgcgccgcccatcatcgagtggtttttcatcgctttgagatagtcgagatcgttcttttcattatttgaatcgggtacttcgccagcgctgaatgcgctgatattttcgttagtaatagtggtcataatggtaattccttttaagtgttttagaccggtgacggagtttcccttccgccaacccattatttattattcgattaattaacgaatcgactgagcaatcgacttagttgattcaccgttcatgctctgcacggcgttggccatcgctaccgcagtgttaaaactctgcatcagctgttgtaattttaattggctgctttgcacaaaatctgttgcgcgggtggcggtggattcgagcgcgtttttaacttcttcaagctgggattttgacatctttttgacgatgttctctggatcacccccttctttttttacttgtgcggcataggattttttttctttttcaatacgagcagtatcccccttatgttcaggcgccaaatttttctcatctttccaatactggtaatgccattccgcttgcgtatatcccacgccttctaagaaatcatcaacactcttcccgccgatcagaatgttattctttttcatataatcgatcacgtcttggggcaactcgccaagatcatcaccgcttgccagcttggcaacaatcccttcaacgcggttggctaaatcggtagcgtcacggcctactgcggttttgtcctgcatttgcttaaacttaccctgcgcaagctcggtaaacatcagcatcatctcttccatagtcaccatcgcgccgcccatcatcgagtggtttttcatcgctttgagatagtcgagatcgttcttttcatcattggattgtggtacttcgccagcgctgaatgcgctgatattttcgttggtgatggtggtcataatggtaattccttttatttactttccatttattttaccggcgggtaataccgcaccggcttttgattaatttttacttataactttcaattacgagacattattaacgaatcgactgagcaattgatttagttgattcaccgttcatgctctgtacggcgttggccattgctaccgcagtgttaaaactctgcatcagctgttgtaattttaactggctgctttgcacaaagtcggtggcgcgagtggcggtggattcgagtgcgcctttaaattcttcgagctgggctttatcaagtttagctccactgccacctgcagaagcgagatattccttaacagatttacccgcaatctgaatattatttttctccatatagtcgataacgtccttcggaagtactgccgtacttttgtcatctcccagcttggcaataatcccttcaacgcggttggctaaatcggtggcgtcacggcctaccgcggttttgtcctgcatttgcttaaatttaccctgcgcaagctcggtaaacatcagcatcatctcttccatggtcaccatcgcgccacccatcatcgagtggtttttcatcgctttgagatagtcgagatcgttcttttcatcattggattgtggaacttcgccagcgctgaatgcgctgatattttcgttggtgatggtggtcataatggtaattccttttaagtgttttaatcgctggtggaatttcccttccgccaaccaatatttattatttgattaattaacgaatcgactgagcaattgatttagttgattcaccgttcatgctctgcacggcgttggccatcgctaccgcagtgttaaaactctgcattagctgttgtaattttagctggctgctttgtacaaaatcggtggcgcgggtggcggtggattcgagcgcgcctttaatttcttccatctcggctttggtaaattccactttagtcaaagcttcataaaggccttttttagcacttttcagctctgaggttgctttctctacctcagcgggggtcttggcgttcgcgagagccttctctgcggtattcactttaccctgagcattattaatttcagtcttcttggccgggatgctcgtcgcggcaagcacatagtctttgaccgattttccagcgataagaatattgtttttatccatatattccagaacgtccgccggtatctttccgtttttatcaccttccactttggcaataatcccttcaacgcggttagccatatcggtggcatcacggcctactgcggttttgtcctgcatttgcttaaatttaccctgcgcaagttcggtaaacatcagcatcatctcttccatggtgaccatcgcgccgcccatcatcgagtgatttttcatcgccttgagatagtcgaggtcattcttttcattattggattctggtacttcgccagcgctgaatgcactgatattttcgttggtgatggtggtcataatggtaattccttttatttactttccgttttttttcgccggcagggaattccacaccggcggacatttactttttacttctcgtcttttaattcaaaacgctattaacgaattgactgagcgattgctttagtcgattctgcgttcatgctctgtacggcgttagccatggctaccgcggtgttaaagctctgcataagctgctgcagtttcaactgatcttgctgtacaaaatcggttgcacgggtagaggctgattccagggtgctctgaatggatttcagggcttttttgtctaaattaatcgcgccagtgccttcatttggcaccgtagggagtgtgccagcaacattatctgcattgtcacccgcagcaccgtttaccggcttggtctggtccatggtgccgaatttgcctgcctcttttggtttagaagcaccgttgatgaaatcaccaatcggcttgttgttaaccagaatgttgttgtctttaatataatcaagaatgtcttgatccagggtagccgtaccgtctgctgtagcaatatttgccagagcggactcgactcttgttgccatatcggaagcgtcacgaccaacgttggttttctctctcatctgctcaaacttcttagcagccagctcggtaaacatcagcatcatctcttccatggtgaccattgcgtctcccatgatggagtggttcttcatcgccatcagatagtagttcttctgaacgtcatttttatccgcaacggcggtcgattgtgctgtgtttactcttactgtatcaatgtggctcattacttatttcctgttaattgatagatgttgctcacaacgctttcctaaataatttcgctccctgctgcgctgctagtggagccatattagcgattcaaaaaaagcaaactttctgatttctgcaaaaacttctgttttttttcacagcactttttaattgcaaattaatattggccggcttgcgctcaatcaatgtcaggtcaacacctgatgtcttcaaaatggcatatagaagaaaataaaatcgtattagaaattcactaacggaaaatacgatgccagcaataagatttatcgtaaccaaatgcgagatatccttttctcataaaggaggactgcatgcatttccggctaatagcctgataattaccgataatcatgcccaaatggttggcaagattgaaagcgccaacaccattattatggattttttttgttcggatttgcagcagctttattcaacggtcacggaattgcttgatactaacgttcaacaaaccctgaaccatgaattaataaaaaccgtaggtgcagaacacgctgttatagaggtgttgtattccctcgcaactttatccgcagacagttttcttcaattttgttacacctattgcctcagccgcgaaagaacctatttttcagcgctgcttcgccaacgagtctccggcaacaaagagttttgtcattttattgaagaaaactttcttcagcagtggccgattgccaaattagccgaagagctggacatacctttaaggaaatttaaccaactttttcaagatacctatggaaaacccgccaaacgctggctgcttgagcgcaggcttgaacatgccaaaaagctgctgattactaccccgctgcgggtcattgatatcgcgctggagtgtggtttttccaatcatgcccatttcacggatacctttcgccgccattacagctgcaatccgaaacaggtgcgggaatacaaacgccaagaaagtcaccaagaaatcagaatctgaggaaaacctatggatattgaagccgtcaccaatcagctttcacagctggtagagagcgcaggtaatgaagttcaggcgaaggttaccgccggcgatatgaatgaccctgcgcaaatgttgaaagcccagtttgcaatccagcagtactcggtttttgtcagctatgagagcgccatcatgcgcgccgtcaaagatatgctgtcagggattattcaaaaaatatgataccgctcgatgcttcactccgccgactgatggtcgaaactagcctgatggccgtgaaccacggctttcacacccaggcacgtacccttctggccgcactgccactgctcaccgagaaccatgaggcgcagaaaattatcgaagccacgctgcttatcggcctcggcgagaacaaggccgccgcgttgtccctcaagggtaatacgtcgccagatgctgaaatattacgtcgcctgttaacccgcggcgcactgtcccactaatccccatttcgtttgccaacaaaagagagtttatcaatggaaatcaccgcagccacaatgaacgccatgacctccagccttgatgctactgaagcggtttctgccgtgccagaagccgccgatatcgaggcattttcccgcgccctgttcggcaaagaaaataaaaccccggaagaaatggccgcaacgggattgcaggaaaaaagtgcctcctttgttcaggcaagcaaaaactcccgttcaaccgctgaggttatcaataaccctgaagtgatgatgaaagtgcagtcgacgatgtcgagagaaattcttgaggtcgatctgatagccaaagtcacgggttcactttctcagggcattaacaagttgacgagtatgcaatgaaacgttcttacgggcgctatgccctgcttgcagttctggcgctgtgcctgaccggctgtaaaatcgaactttatagcgggttgtcggaggcggacgccaatcagatgctggcccttctgatgctgcgtaacattgacagcgaaaagaaagtggtcaaagaagacagcgtgacggtcaaggtggaacaatcgcagttcgtagacgccgtagaagttcttcgccaaaacgggctacccgccaaacctacggacagcatgaatgagatattcccggccggtcagctggtcacttcaccggttcaggaacaggcaaagataaactaccttaaagaacagctgctggaaaaaatgctgcgcgcgatggacggcgtggtgagcgcgcaggtgtcgatagccgagagtatttccagcaatcgccgcgacctgccgatcccttccgcctcggtgtttatcaaatttacgccgggcatcaatatgcacagtcgtgaaggcgatatcagaaaccttatctataaagggtaccgaacctgcgcgccgagaatatctcggtggtgctacagtccactgattatcgctatgcgcgtccgctgccggtggttgagcggtcagcgctgcagaaatgggcaccgtggattggcggtgcctctgccctgctggtcgccgcgatgggactggtatggatggcgttccagcgtcggaagaaaaccccatgaacgatgccctctccgagccgttaaaacgcctgcatcagcttgcgtggcaggccggtgcgtggatggacgaaggctggtggcagtcgctgtcgctggccgactggcaaaagagttatcagcagtatccgcgcactcgcccgcagcttgaccggctaattgccgcacgccgtgggtttccgcagtcagcgctgccttctaccctaacgccggagcagctaaagcttctcaagctggaagaccgcctgccggggctttgcaccgcgctagggttgctggctatctcctgccccgattacctgatgatcggccactatcgtcgcgtgctgtcagacattcttggctctcgcggctgcgatcagctactggcgctgggcgaattcagctcgccacggcctgccagccttagccccgaaaccttggttgaacaggcgcaggaaaccggcacggcctggtggcgcagcgcatcggaacactgcgaggtctgtaacgccatgcaaattattctcccgcctggggtaagtgaagtcgtgccaacgctgggctcgccgataccctggttactgcgtataggacgttttatatgagccgactaaacgttgtcgttaaacagctcgccggatgtttccaccacgggccggtcataacggccagcaatctagaagaatatattcaggcggccgatatcattgagcgtgctcatcaggaggcggcagaactgcgcagccgtgccgaggaatatctcgacaacatccagcaacagtgtgccgaagaacgcgaggccgcaagacaggaagggcaagcgtgggcagaggaagacgcgccggcccatcgccagagcgccgtcgcagacgcggtggaatggcttatttgtgaacatgagcttgagggcgatattatccaacgcctggagcctcagatgcgcaatatcctggctcaggtgtttaaagagttttacctgcagcaggacggctgtcgtctactgctcgatcggctgcgtgaagtgctcgataaaatgctgcagcaggaagccggtacgctgtttgtctgcccagaccagtgggaagaactgcgccagtcgtttgcctcctatccctctctggcggtgaaaatgaacccgcagctaggactgggcgaggcgcggctggtcacaccgctggtgacgctgtcgatcaatcttgaagagcagctcgacgcgattcttacacggctgctgaaaatgcgtgaggacggttattatgcagattaaggttgaacactcgaccgttcgtgcgcaggttcacgcgccgcagaacatcgccgcccatacgattaatcattcccctctaagaacggcgaacatcaaggcgacgcaggtaacgccggccaattcagctatggagatggcgaaaaaccagcttgagccggaatttatggagatggaaggcgcatttcctaccgatgaagccatgtacgagacgcaggaaaatatcggttttacaataggttcatccccgggacgtggacgcggccaatcgggaggcaccggaggcacagaccgttctcgaccgcgcagcatggtgcaaaaacttgttaaagcaggcaccgccagcgaagacgagattaaagaactgcgtagtcggattggcggcattgaagaagcggaagaagtcgatgacctgctcaactcgatgaagcgcaatgaaatggatgccggtgagatggcgctgatgctgggcagcatgctcaacgaagagaatatttctccatcacggcgtaaaaaactgcagcaggcgttgaataaggtgatggatgatgaagactggctactgcaattatttggcagtctggaattcggcagcctccaccgcagtgcgctcggtgagcttcgccgtctgtatcagaaggccgccagcaggcagtcaggtctgaattactggttctcgcagttccgtcagcttaaggaccgtaagcgcaaaatgaagacgctgatccgcgccctcgccttcgagctttcggccgaaaatgacgtcagtgacattcgccttgccgccgtcgtcaccgaccttaaacgcattttgcaattcatgaccatcgaagatcacagccaaaaaatggccaaagacctgaagatccctgaggtgacgggtgaccgtattaccgaagaactgctcgaaattgttcagcagtcctgggtttacagcgactggttgtaccaacgcgccagcagtatcttaccggaaggtcatagccaacacggctatgcaagacgcatggtcgaactggtcaaaatgcttccggaagcctgctttgaagacgtcgaacaacgtgaaacggtgatgcaggcgtttagcgagtatcaggaaagactggcagacgaagacgagtaacccagacttcgcccggtgacctgccggtgttaatagaatggggcatcaattttctctgtcgcaaaggcacgctggaccgcaggacggtaggcaatccgcggcaagtattctccgaagtccggtctggctcttgccgggtacggcatatcacgggtccagcgggcaagcatcagaataaacaaatccactaccgtgcaatcctgccccagaaaataaggtcctttaccctcttgcctgttgcggcgcagcctgttgtcgatctggtccagcgtgtcggcaatatttttgcaggcctgctctctgatttcagctttcccacattcgctatatttttgcggcataaagtaggtcatcagctcagtttgcaaggtactagtcaggtaaaatagccactgataaaactcaccgcgctggggtgaacccacgaggggaccaaaattgcagtctgggtttttatcagacaaatacaagcagatagccgcagtttcagagataaccgtctcaccgtcggtcaataaaggaattttacctaccgggttaagcgccagatattcagcgcttttgtgctgattgtttttgacatcgacgttaaccaactcgaagggtattccgagttcttcgagcagcatatgcggcgtcaggctggccttgcctcggcagtagtaaagttgatacatcgcttaacctccttgttgactggggattttaagcataagcccaaatcccctccgatcctcagatcttatgcagaaatttatccgctttcagtcagccttttatttatctcgacgttcgtcattagcgcaccgcgcacctcgagccgttgctctttgttgaccttaaagccgcaattttcgaaaaaaggccgggcggtgatactggcatgcatagtcagatgagttaaacactcagcgatggcctccctttttcagttctttctgacaacgatacggcgaataattttgcccgaggactggctaacaattttctcatccatcaacagctgggcacctgcaagaccgtttataacgatgcgttcgtcaaaggccgcatagagacgaccgcgctcgtcgcgtttgtcctcctcttcggttacccgccagctgagatataagatcccctgactctttagcagcctcagcagtttttgcactgagggttctatcaagtcgatgggcaaatgcatgatgaccgtttcacagagcacattttcaaaactttgctccttcacgccgaccagttctggcaacgctgactgaaacaggctgagctcagggtgcatttcatgagcctgtaacagcagtccttttgacgcatcgacgcctaccgttggatagccattagcgttaagccaggcggcatctcttccgctgccgcagccgacgtcgatagttggaccctgagtgaaaaactttcttaccgtgtcacgaaggtcctctcctgcaggctgcgattcccattcctgcgcatagtcggccgcatcacggtcgtaggttgcaagcgttttcatatccattaactttctcctctccattacttcacttattttctcgaatttaatccataaatactccactcgaagtcaatgaaatgaccgacgacgtcacaataatgttaaaaaaatgtttcagattgtcgtgagtaatattgattgacgaagttataagtcaatgacatattagatttatgaatatatacagcgcactaacacagacaaccaccacaacgactaccctatcgggtgggtcgcaggttgtcttacgctgttaacgacaagtttacagactgtataagcaactgagccccgccggagaaggcggggctttttttcccctgacctttccggctttaacgaaaagaacaaggagaaacgccatgcagcaaaatctcgcccccaaacaggccctgctcgttatcgacatgcagattggccagtgctccgtcgcgccgcttcccttccagcgtgaagctctgctcgacaatattaatcagctcattgaacactttcatcagcatgctttaccagtattcttcattcgccacgcgggaccgccgggttcgccctatgccgccggagaaaagatctggaacgttgtgcctgaattaaaatttgatgccgcacgcgataaatttgtcgataagtctcgcgccagctgtttcgatggcaccgatttagccgaaatactgcaacagcaacatattggcgaggtggtgattgtgggccttaaaactcagtactgtgttgatactgcctgtcgctcttctctcgccttgggtattaagccgattcttatctctgatgggcatagctgtattaatactgcacaactttctgcggccgatattattgctcaccacaatgcctgccttaatgggccgattgccagggtaatggacactgcggctttcattgccgctgaacaatagccttctaaatttgtattcgcgtaatgaaatgataaaagtgagcaggacttattctgctcactttttaatccatggataaactcttgttaaattaagactattcctgcaagcccgattgaaaatcaccggtaaactccctccttaagtattccttaatttattccctgtaatatcaagggcgttagttacctatacgaaagttaaataagtcggctttattgattgtcacactctttacgcgtggttcggtaagacttaacgttgaactgaataagtttttcacggtcagcatgtcagtaaacttgcagtaacaaaattttcggcgcctattttgccgaccaaaagatgagggtatttatggaacagcttaaccacttgctgttcgcctggattaatgcaacacctgcttcgccgaaatggctgctggatattgccttcttcctggcgaacgacatgatttttatcgtgccggttatcatcgttggcctatggctatggggtaataatcaaacaataagtttgcagcgtgaactcgccactaaaattggcattgcgctgatattcgccatgacctgtgcaaaaacgctttccgagctgtttccccatgcccgtccatttgttgaaggctttggttataccttcctgcaacacgctcctgacagttcattcccgagcgatcacggcaccgctatctttaccttcgccctggctttcgttttctggcaccgcgtctggtccggcgtgctgttcctggttatcggtgccggtatcgcctggtctcgcgtttatcttggcgtgcattggccgatggatatgctgggcggcctgctggttggcatgctcgcttgccttttctcacagctggtatggaacctgtttggcatgcaaatccgcgcgctgatggagaaactttaccgctttagctttgctctccccattcgtaaaggctgggtgcgcgaataaaagccgcatttatccaggcaaataaaaaggcgaggatggattcctcgccttttttgtatttctgaaaagtcggttatttaccgaatactttactgaaaagaccgctcaccttcatcatcacgaagtcccagatgcgactaaagaagccaccctgcggcacatcttcttttgccaccaatggacgctgctcaatgaccttaccgtcaagcgagaagtcgatagtaccaacaacctgattcttggtaatcggcgcctctagctgcgggttgttcagcgtgaaactggccttgaggttcttaagctgacctttcgggaaggtcaacgacgcatcttctgctacgcccaacggcacggttttctgtgccccaaaccatacgcgctgcgtggtgaaagcatcggcggccttgattggggtgatagtttcataaaaacggaagccccaggtaagcagagattcgctctcactgaaacgcacgcgatcgctcggggcgcccatcaccacggcgatgagtcgcatcccgttggagtcaaccgccgatgacaccaggttgtaacctgcgcctgaggtgtagccggttttgatcccgtcgacgttcaggttagtgctccacagcaggcggttacggttaacctgacgaatgcggttaaaggtgaactctttttccttgttcatcgcatattcgtctggcgtatcgtggataagcgcacgggagagcaacgccatgtccttcgccgaggtgtactggccgtcagagtccagaccgtgcacggttttgaactggtattggtcagattcaactgctgcgaataacggttcatcagccccacgaaggcgtcctgactgcccgcgacgtaatcagccaacgcaatgctggcgtcgttgccggactggataacgacgcctttattcagctcggaaacaggcacctgatcgcccggtttgaggaacatcaacgacgagccgcgcagcaccgggttaccggtcgcccacgcgtctttgccgatggtcaccacgtcagtggagtgaatcttgcctgatttcagcgcctggccgacaacataactgaccatgattttcgtcaggctggcagggtcgagtcgcgcatcaggctgcgactcggcaataattttgccactgccgtagtccatcagcacccatgattttgcgtcaatttgcggagaaaccggggcacccggagtgggggttgaagaggctgcgatgtccaccggttttgctggagcagtgtcggcgtgtgcagcgggaaacgttagcaacaaaacggtgccgctgaacgtacaaagaaggttccgtttagataagaaagaaattgtcataggttattagcgcttctgtccgggtaactgaaatttatgttatctttcaatcaggtttgaacttatcggtataaaaaataccgttttatggcttgagaagaaactcctcgaatgtaaagtttctttgaatagtagacttaattgcgcttttgtctgcctcagatcgcgtaattgagcgaattttaccgaaaaattccgccctgcggtgattgtacagtcagcttagcggcagagctcaccaaaaatctaaatgttttatcaacatatgcgattcaacgacaaaaatcgcactgacgcacaaaggcttgtttaacctttaaccattgccgctccactgcacagcttcattttagtttcatcaaaaatttttctttttcgccttacgcttcacaattttttccgctaacctgaattgacatcgtattttacggggaactgggtgatggatttagcgctgttcgatctcgataaaacgctgattagcgatgacagtgccagcctgtggctacattggttagtttctcagggctatacgacgacggcacgcttagaccatcaccaacgacaaatgcaccccgttactcactatgcagactccccgccagaccccaacaatatcgcctgttatttaaaactcacccttgcgccaatgagcggttatcaccgccgtacggtatccggttgggttgagcgtttcgtgcatcgcgatattttacccaggctgtatccacaggcccggcagcagattgcctggcataaggaacgtggcgacactattgccctgatttctgcctcgggcgagcatctggtgacgcccatcgcgcgccgtctggggatcgatcacgcgttcggcatcgtgccggaattcaacgaccatcggcagtgttttaccggtgagaccaccggcgaactgacgtttcatcagggcacggtgcatcgccttgagtcatggctgcaacagccgacgacgccgcagtttaaaaagacttacgcctacagcgattctatcttcgacctgccgctgctggagtttgtagactatccgacgatcgtcaacggctgccgcgcgctacaacagattgccgaaaagaaaggctggcctagcgtcagttggcaacggcatccggcgcgcgaaagagtcgcgtcctgaccgctctgcgctaacgccccgctataaaccaaagtcgcgctcgaaggccgcgccttcacggtttaataactcacagctgaaatcaataaactggcttagcgccgccgagcggtgcctgcccgcctgcgtttgcagttgtaacgttcgctggctgagttgttcaatgttgatagacttcaaaaccaaccggtcccggcgagccttgaacatcaccgaaaaatggctacaggccaccagcgcgcccggcgtgcaaagcataaagtcatacagcgtgctgaagcgattgcagctcaaggccggttcgagaaatattccattcatgcgacatgacaaatcaaacagctggcgaatggtgctcgttggctcattaaaggccagcggataagcatgcaggtcgccaagctgcacttgctggtgagccagcgggtgatcgtgacgcatcgccagaagaaccgacgcaggataggacgccagcacatcaacgcctcgctctggcgtcaggctgaactgcaaggccagatcacaatcgccgctgcgaatagtctcggatacctgctgcgccgtgcccacgttaaggtaaaacatcacgccgggattaatggcgcgaaagcgggcaaacatttgcggcagcaggtcataagcgggcccgtcagtgcaggccatgcgaatcaccgtgcggcgcaccgccttgagcccctgaatctcggcaatcgcaaactccatatccatcatgctcttacgcacgtgattttcgaggatttgcccggcatcattgagcaccatccctcgagcgtgtcgctcaaacagcgtcgcaccgattcgcgtttccagttgctgaatctgtcggctgatggctgataccgccacaaacagctgcttgctggcagcgcttaacgaacccgtattggcgaccgccaaaaaatagcgaatttcagtgctgtgcatattttgctccgcgagagtgcatgcctctattttgtgcatgggagcgttataattaaagcaatgcttcattgcaattattattattgtggcaaagctgcattttctattacataaggagagcataaaccaataaaaaataattaagacaacatcaggactttctatgacagtggaaaaagcagtaaagcaggctctgggatggtttgacggcggcgaattcaaggcggtgctcgcgcgacgcgtagcattggcgaccgagagtcagtcaaccgagcgtgacgagatattgaaacgttacttcgaagaagaaattaatcccgcgctgcgggcaatgggctttgagctgcagcttatcgataatcctcaggcagccaatcgtccctttctcatcgcatcgcgcattgaagacccgacgttaccgacggtattgagctatggtcacggcgacgtggtgttcggtgacgacgagaactggagtgaaggcctggacccctgggtgctgtttgaggacggtaaccgctggtatggccgaggcagcgccgataacaagggccaacacagcgtcaacctggccgcactggagcaggtattcgccgctcgcggcggcaagcttggcttcaactgcaagctgctgtttgaaatgggtgaagagatcagttctccagggcttgccgaggtctgccgcacacaccaccagaccctcagcgcggatctatttctcgcctccgacggtccacgcctgagcgccgaacgcccaacgctgttcctcggttcccgcggtgcggttaacttccgcctttccgtcaacgcgcgcgacaaagactaccactccggtaactggggcggcttactgccaaacccgggtacgctgctggcgaacgctatttcatgccttatcaatcagcagggacagatgcaagtcgcagcgttgaaaccgcccgcggtcagcactgcgattcgcgagatcctccgcgatatcgaggtcgcgactacgccgggcgatcctgaaattgacgttaactggggtgaagcgggtctgacgccggccgaacgcctgtttgcctggaatcagatggaagtgctgtcgtttttgaccggcaacccggcacgcccaatgaatgccattcccgccaaggcaacggcggtgtgtcagatgcgttttgtggtcggcaccgactggcaaaatttgcaacaacacgtgcgtgagcatctcgatgcccacggattccactccgttgaggtcgagttcctgcgcggttcaccggcaacccgttttgatcccaccgacccgctggtcgattgggtgctcgaagtcatgcagcagagcagcgataaaaagcccgccctgctgcctaacctcggcggttctctgcccaatgaggtgttcgccgatatcctcggcctgccgacgctgtgggtgccgcactcttatccagcctgcggccagcacgcggtagacgaacacatgctgatttccatcgcccgtgaaggcctggagatcatgacgcgtctgttctggagtctgggcgagcgcggcgacgcgttgctggcggcacaccatcagcacgcggcaaaaagtctggcgcaggacggtggaaaatgagccacgcatcttcagccttatcaaccgctacggcggtaaaaccgagcctgaccaaaacgctttttgtcacctgtatcggcaatgcgctggagtggttcgacattgcggtctatggcttcttcgctgcttacatcgcgcgtgcctatttcccgacgaccgaccagaccgtttccctgctgcttgccttcggcagcttcggcgtatcgtttttgattcgcccgttgggtgccattgtactgggtgcctttgccgaccgtgccggtcgcaagtcgtcactgctggcgtcaatcagcctgatgatgctcggtagcctaatgattgtcgtcacgccgtcttatgccacgctcggtctggcggctccgctgttaattctgctggcccgtttgattcagggcttttcggcgggcggcgaattcggcagctcgaccgcgtttctggttgaacactttcccgagcgtaaagcctacattgccagctggcagttcgcgacgcagggtgccagcaccctcctcgcctcggcctttggcttgggcctgtcacagtggctctcggaatcgcagatccaggactggggatggcgcattcctttcgcctttgggctgttgatagggccggtcggtctgtacattcgccgcaatatcgaggaagccgacagctttgttaaagccgaccgccaggcttcgccgctgaaaacgctattcggtcagcagaagtcgctgctgtgcatggcggtagggctgatggtagtctcgacggcaatcaattatatgctgaactatgtaccgacctatgcgactaaaacgctgcatttttcggggcagattgccttcaccgccacgctgctggccggcgtcattttgaccgttgcgaccccgctgatgggcctgtgggccgaaaaagtgggccgtttgccgctgatgtggggttcacttgtcctgctattgatcactatttatccaggcttttggctgatgacgcactacaacacggcctcggcgctgattgccctggtatgttggatggcgttattgaaatcggtgtacttttcagcggtgccgtcgatgatggccgacctgttccccgttaccacacgcgccagcggtatggctatcggttataacattgcggtcaccgtatttggcggtttcgcgccgttcatctgtaccctgctcatcaccgctaccggcacaaagctcgcgccgagctattatctgatgattgtggcgctgctcagcctgtgggcgttgattaactctcagcgcagccgcaggtaaacgggagtttctcgccgacgccacgtcggcgagaaacatttcgtcgcggcttacttcggcgacagcttgaacagcttgccgtttttctcgtccgtcaacacatagacatagccgtccggcccaacctgaacttcacgaatgcgctggcctaaatcggtcagcatgcgtttctctccgagcacttttttatcgttcaccttcagctgaatcagcgtcgtttccttcaatgccccaacaaacagtgaattcttccactgtgggaatttgctgtcgttatagaaggccataccgctgacagcaggagatacgcgccagtaatagagcgggtcttccattccatcgagatgcgagcctttggcttctgggatcggcagtccgttgtagttaatgccgtaggtggcgaacggccagccgtagtttttgcccgctttgagaatgttcacctcgtcaccgccgcgtggcccatgctcggtttcccacagctcgccgctccaggggttgtaagccaacgcctggggattacggttgccgtaggtccagatttcaggacgcgcgttaggcaacttcacgaagggattgtcctgcggaataccgccctcgggcgtcaggcgaattatcttaccgcgcagagaatcaagctgttgtgcggcgatgcgctggttgttgtcgcccagcgacatcagaatattgccctgcggatcaaatatcagcctgccgccgagattgattccaccgtcgagcggcggtgtttcgataaagatggttttaaagttctcaaggtgcaggccgtcctgcgaaagcgtgccatagccaagctctgcatgcggccgccccttgtcatctttttgcgcaaagcttagataaacgcggcggcttttggcaaaatcaggcgcaggacgcacgtcccacaggcccgcttgatcctgaacccacaccgcaggcacgccggttaccggggccgaaagcggtttgcctgcctgccacaggcgcagattaccgctgcgttcagtgattaacgcaccctgattgtcgggcagaaatgccagcgaccaagggtgatcgaggccttttaacagggtttctactttaacgggcgcctttggcaccggttttggggcggcctgcgccaacgccagtcccggcatcgccagtgcccccaccagcagcatagggtgccaacgggtcggtgtattattcaatgtaaatggcatagcttgcggatcccttccagaaaaacaaactttaattttagaccactactgtcggctatttgtataggcgatgtaaattgcctgacgtctatatctctgaaaaaacgaccactcctggtgagacaaccggtttccaggcgaaaacagatatacccaaaaagaataagtattgccttaaaaataataaataacgcccattcccaaggggaaaacaagcagatacactgcttgaataattagacacctagccttgtagatgtctaaataagattttcattcccgcaagctcttaacttaagcgctgcttttttttggtttcagccaacgcccgacggagtctataaaatgaagaaaatttccgcctcactgcttgctttgagcctgcttgctaccctgccagccttcgcggccgaacagcctgcgctggccgccgttcctgcggcaatcgctcagcacagtggccccattcgcgttgctgtgattcgcaatctgggttcagacgacaacaccacgcagtttcttgccggtgccatcaagcaggggcgtgcgctaggtttcaaggtcgatactttcctaagcaacggcgatgacgctaaattccaggacttcgtcaatcaggccatcagccaaaaatatgacggtatcatcctgtctcagggacggggtccgtattccaataatctggtaaaacgcattaccgccgccggtatcgcggtttcggtgtttgataccgaagtcactgacggcacgccgggtgtcaccgtcacccgtcaggacgatgcgtcactgacccaggcttcagtcggtgaactggtcaaagacttccacggcaaagccaacatcgtgcgcctgtgggttgccggtttcccaccgatggaacgtcgcaacgtcacctatcagcagatcctaaaagacaacccgggcattcatcagcttgaatccatcggtgcggtgtcttcagacgttcagggcgatacggcgaatcaggtcggcgcaattttggccaaatacccgaaaggtaaaattgacgctatctggggtgcgtgggacgccttcagtcaggggcgtataaggcacttaaggagaacggccgcaccgagattaaactttacagcattgatgcctccaaccaggacctgcaattaatgcgtgaaaaagacagcccatggaaattcaccgccgcagtggatactccgctgattggtgccgttaacatgcgtctggtggccctaaaaattgccggtgagaaaacgcctgccacctatgaattctcggcacaggttattccgcagtcgctgctgctgagccaaccgggtgcggttaatatcgcggctctgggcaaaatcatcccaggctggggcaagtctgaagacttcaacgccccgtggtttgcgacgctggaagccaggtacaagaaataatcgctccccactgcggctaaaagcccgcccggcgcaagtctggcgggcttttctattgtgagtcccgcgcgttatgtcataacctgtagccataggtggcgaataaacgcgctgcatcgaaaaaacttgtgaagcagatcacactggcggttaaattaatttaattgtatgatgaatgtagttttcgactgggacaaaggttatgagatctactctatcactgccatttcaatatttacgggcatttattctaatttatgcctgcctttatgcgggaaacggagtttccgccctgcttccactggccattccaggcagtattctcggcatgctcatccttttcacgctgctgtcgacgcaaattctgccttataaatgggttaaaccgggatgcagcgtgctaattcgctatatggcgctgctgtttgtgcctatcggagttggggtgatgaactactacgatcagctgcgcacccagtttggaccgctggtggtgtcctgtgccgtcagcacgctgattgtgctgctggtggtggcttattcgtctcactttgtacaccgtgaacgcaacgtcatcggcaaaccggaggatgaacaatgagccaaatctggtggtcattaccgctgacggtgctggtgtatttcgccacccgcaggctggctgtaaaattgagaatgccgctgcttaatccgctgctgatgtcgatggtcattatcatccctctgctgctggtgacgcatattccctacgcgcgctattttgccggcagtaaaattctcaacgacctgttgcagcctgccgtggtggcgctggcctttcctttatacgagcagctgcatcagattcgcgcccgctggaaatcgattatcagcatctgcttcattggcagcgtcgtggcgatgacgacgggaaccgcgattgccctatggatgggagccacaccgcagattgctgcctcagtgctgcccaagtctgtgacaacgcccatcgccatggccgcggctcagtcaatcaacggcatccccgctattagcgcagtatgcgtgattttcgtcggcattctcggtgcggtgtttggtcacacgattttgaatctgctgaaaatcaccaacaaggcctctcgaggattagccatcggcaacgcttctcacgcattgggtaccgcgcgctgcgccgaagtggactatcaggaggggccttcagctcgctggcgctggtgatttgcggcattatcacctctctgctggccccgtttttattccctatcctgttgaggcttttcggttaatcatattgtaaaacgggtgcggcaggcattgccgcaccactcgctttcacccgcgccgtgataatggatcattttggttcaacgccctatcgctttccctgtctcgccccctttcctgagtcccgtatcccggctttgtatcaaaatttaatcgcaaacaatctttggcccctttattgctttgctctacgtcctaactcgcgctcatgtatagacaagccctccagccaataaggactattgccatgcaaccaacgccagcccctgagtctcaatcggcgaccgacagcgatttactgcaacaagtctggtcgttaatcgatgaaaagaaaggcatattttgggatctcagtgaccgcatctgggaaacaccagaggtcaattacaccgaattcaaatcgtcgcaaggacatctcgacctgctgaaaaagcagggctttcgcgtggcagaaggcgtggcagacctgccaacggcgatgatgggcgaagcaggtgcaggcggtccggtgattgcaattctcggtgaatacgacgctctgcccggccttagccagcaggccgatgttgcacaacctttagcgcttgaagacggggccaacggacacggctgcggccacaatatgctcggttccgccgccttgctggccgcgacggcggtcaaagactatttgcaggccaacgggctggcgggtcgtgtacgttattacggctgtccggcggaagaaggcggttcaggcaagggttttatggtgcgtgcgggcctgttcgacgacgttgacgtcgccatctgctggcatccaggggcttttaactgcgtgaccgacgccaactcgctcgcctgcaatgaacttaactaccatttctcgggccgtgccgctcacgccgccgcgacgccacaccttggccgcagcgcgcttgacgccgttgagctaatgaacgtcggtattaactacctgcgcgaacacatgccgaccagcgcacgcattcactatgccattacggacagcggcggcttctcaccaaacgtggtgcaggctaaggcgaccgtgcgctatctggtgcggacccgcacgctgcccgagcttaccgaactgctcaagcgcgtagataaggtggcacaaggtgcggcactgatgacggaaaccaccatgaaatgcaatatcctcagcggcgacgccaacctgattggtaaccgcgtgcttgaagagctgatgcagtcgcacctcgaacaactcggcggcccgggcttcgacgacgccgactatgcctacgcggcgcgttttcaagagaccatgagtcaggaagagatccgcagtgcctatcagcgcgtcggctgcgcctacacaccgggcgaactgctctgcgactatgtgctgccgctcgaccgcccggaaagttcaatgattggttctaccgacgtcggctcggtcagctgggtggtgcctaccgtgcagtgccgcagtgcgacttacactatcggcacgccggggcactcgtggcagctggtcgcccagggtaaatcctcgctggcgcacaagggactaacgcaggccgccaagctgatggcgagcacggcagtcggcctgtttacccagcccgcgcgcatcgcagaagccaaggccgaacacgcccgcgtgctggaaggcaccccctttgtgaacccgattcctgacgatgtacagccgccgtttccgggcagccactgattgcgtctgacagactcacgaggagcgactgatgggcaatttgggattcttaaccacgctgagctttggccccggaggatgggggccgatgctgctctccggtgcgttgatgaccgtggcactgtcactttctggctttctgcttgccggggtgataggtggtctcttttcctgggcaaaaatctgcggtaatcgcccagtacgttatgttgccgatgtttataccacggtgattcgcggtattcccgacctgctcattatctatctgctttattttggcggcagtcaggcgctgaccctgctcggcaaactgtttggcgacggacagttcgtcagctttccgggatttttagccggaatgctggcggtcggcattgcggcaggcgcgcagcaaaccgaggtgttccggggcgctttctacgccatagcgcccggtgagctagaggcagccaaggcgtatggtatgagcacaccggtgcgcattcgccgcatcgttgttcccctgctgctgcgccacgccctgccgggcatgggcaacgtctggcagctggtgttgaaggcagcggcgctggtgtcggtcaccggactggctgagctgatgaacaaggcgcagaccggtgcaggctcgaccggtaaaccgttcgatttttactgtgcggcggcgctgttgtatctcattatctcggccttttcgggctggtcgctgcgtcgggcagaggtgcactactcacgcggggttaaacgctgatggacgttaaatttctatgggaaaccctgctccagctgctgcccggcgtcccccttaccctacagttgaccttctattcggtggtgatgggtttctgccttgcgctgctcatcgctttcgcccgtctgtcgccttatcgcacgctgaatctcccggcgcgggcattcgtgttctgttttcgcggtaccccgctgctggtccaactatttttgatttactacggactgggtcaatttgagagcgtgcgcagcagcatactgtggccggtactgcgcgagccctacggctgtgcgctgctttcgctgtcgctttgcactgccgcctatggcagtgaaattctgcgcgggggtttgcaatcagtgccgcacggcgcgatagaggcagcgcgggcctgcggtatgtcacggctgctgatggtgaggcgcattatcatgcctgtagccctgcgtcaggcgcttcctgcctacggcaacgagctcatttctatggttcagtccacgtcgttatgttcaatcatcacactgatggacatcaccggtatcgccgcacagatagtgtccgatacctatcgtgcgctggaggtttttttggtaacgggcgcgctctacctattgatcaatctggtcattagccgagttgtgatgctggtcgaatatcgcctgacgccgcatttacggggttttcattttaaaactaaaggggttgtagaacatgaaattggcaagcttggttagtgctttatgcttaacggcaacgttattcatcccttttaccagccacgcagaggccggtaaaaaatggactgtggtgaaaattgccaccgaaggtgcctttcgccccttcaacttcaccaaacctgacggcacgctcgacggttttgaaatcgacctctacaaagtcctgtgtcagaaaatggacgtaaaatgtgaaatcgtggttcagccgtttgccgggattatccccgcgctaaacgcagggaaattcgatgccatcatggatgggctttccgccaccgacgcgcgcaagaagattatcgatttttcagttccctacagtaacaccggtcagactttcgccgttatgaaaggcagtccactggcggtcatgcctgacctgggtaaacgattctctctcacccgcgatgaagccggtgccgaggccgaagtggcaaagattgcgccattgctgaaggggaaaattgttggcgtacagggctcttctatcggtgaacagttcctgcaaaaatacctgaaaggcatcgtgactattcgtcaatacaagactactgaagagcacgatctcgaccttaagtcgggtcgcgtggatatgatatttgcttcggcaacctatctcactggcgcgaaggccaagccggggaatcaagacatcgagctggcaggcccgcagtttatcggtggcttgctcggcgcaggttcagcggtggggattcgcaagagcgacccggaactgaagaaaatgtttgatgacgccatcctgcaaaccaaacaggacggcacgctgaaaacgctggccatgaagtggttcggtaccgacaccgtgcctcaataaccggataaaaacgttggggtgttcgtctcaacgacctcttcgcgccaacaacagttttgcactgatagcggcatgatgctttgagcgtctttcactaaaaaacccacgtccgctttttgctgacagcaaggcggacgtgggtcgcaggaaaaactcagttcttggcgagctgatttcctggcttattctgattcagggtgatggtggcgttatattctcgcggcagtcttctggcctctaaaaataccgatttccagtaagggttgtcgagcgaggagcgaataacgcctttgctaaccgaagcgtgcaggaattgctgattggtatcgtagaagccaacgtgcatctggttgcgaatgcggaagaacaccagatcgcccggttcgagatgccccggagaaacgcgggttcccatgcgcaccagctcggtggtggtcacacggtccattggaatattgaatctgtctttgagtgttctccagacgaaaccggaacaatcgacgcctgacagcttggtgccaccccactcatagggcgttccctgccaggagtgcatctggtcatgcagcgccgcgataacggaaatcatatcggattcccgctcggcttcctgctgcgtcatggtggtattggcagcggattgaccgtcctgaccgtgattcttcgaagaacatccggctaatagtacaaatgatatacaagctattttcttgaataattttgatgatgtcatttgatgtaaaccgaacaattgaaataagtaattgagttttataacctacatctcaaaagcacaaaatgtagcaaacggcattattaccttactttactcaaatttacagtaatttacttaagtcagtgctcaacccggcaatagttacacaaatccggccgaaatccgaacaattaaaccggtgcgattgaaaatcttggcataaacgtcgcttcaaaatcgggcatgatgcccgcctcttctcctcgcagatcgcaaataattcttcgcgcggcctcgcggcccatctcatagaccggctgagcaattaccgagagcggcggcgagacaatttccgtccacgggaaattatcaaacatcacaaacgacagatcctgcggcacgcgtagccctctgccgcccagctcacgcagcaggctcatggcaatgacgctgtctgaggcaattatcgccgttggcggctgcggagcattaaacagccgctcgacgatagcggctatcgcctggtcgctgctggcgttaccgacaatcgacgccgggtctacactgaggccgcgttgggagaatgcccgttcgataccggcaacacgctgcgccaccggcgtgacgcccaaccctttggtcggcgaatatggcggttcgaaggtcatgctggtcagatagctgatgcgtcgatgtccggcgtcgagcaacgacagcgtcgcctgctgcgcggtcgacgtaaagtcgaggccaatcacctcgacgtttaactcgggcacggcgcggtcgaacagcttgagtgctctgccgtcggcgaggatttgcgccagatgggcgttatcttcaggcaacgacgagcacggcgcgatgatgataccgtcgacctgcttttcgagcatcaccctgaccgcgtcctgctccaccgctagcgtctcgtcactgttgctcagcaacaggtgataccccgcctgccgagcgacgtctgagataccgcgcagcgccagaccaaagtgcgggttctcgatatcacccacaatcacgcctagcgtatttgaacggccggtgttcatgctgcgtgccagttcgttgggccgatagctcaacctctgcgccgccgccctaacccgcgttaatacctcttcactcacagagccataaccgcccagtgcgcgcgccgcctgggcctttgaaacctgcgcctcgcgggcgacgtcggccaccgttggggccttgattcgtgcgttgccaatagtcataagttattcgtatcacagctttcgttaagggcgattgacgtttagataatcacgttgctagtatcattgtaactgatttgagaccggtctcacaatgattgaactccctaatcagcccctgcattgagaccggtctctaaaaaatacaaaagatcctggctcaatagtcgttgatgttaaatacaacaaaaacggacgcactatgaaatcgcaaaagaccctgattaaactggccaccgtgctttttgcttcgctctcactcttttctctttcgtccccgctggccaacgccgcgggccagcaggaaaacccttatgggttaatcgaaccgggcgagctgcgcgttgccagcctcggcgacgccaagccttatacctttactgacgcctccggcaatttcaccggttttgacgtcgagttcttcaccgacgttgcgcaccgactcggcatcaataaggtggtgtttatcggccaagacttcgccggcatcctgccttcggtcgcaaacggacgctatgacgcaggcgtcgcggcgataggtatcaccccggctcgtgaaaaaaccgtcgatttctcaagcggctatctcgccggttatctgacggtactgacgcgtaaagacaccggcgtcaccgacgtcaattcgctggcaaaacaccgtctcgcggtggtgcaggggacgttgcaggaaaactacgcgatgcagcatttcacccaaactgacctggtgcgcttccccgataacaatgcggccatctctgcgctgaacaacggcacggttgacgccgacttcctcgattatgaggcggccaaagactacgccgcccgcttcaatctggttcacgctgccgatatcccgtcctttgacgcgccagctggcgttgctatcgccaagggaaaacccgcgtttaaagccgccctggataaggcgattcaggcctcgatgcaggatggcacctggaagaagctctaccagaaatggttcccaggctcgccaatgccaaagcagtatctgccgcattcaagctgatgttccctgctcgtcgtctgtctgtttaccccgcggtgagggcagcctcaccccgttaaaagtgcgaggtattgtatgagcctgttcgaaatgcttcaccggacattcttcgattttaattcgatggccgaagtcctgccgcagctgctgaaagtcgggctgatgaatacgttgatcatctcgattgcggcgacgctgcttggcaccacgctcgggctgattctggcgctgatgggcatctcgcccacgcgctggctgcgtgtgccatcgcgcgtctataccgacctgtttcgcggcctgccgtctatactgaccattctgctgataggtcaggggctagcgcgctacagctatgaacttttcggtccgtcgccctatccgctcggtatttttgccctgagcctgatagccagtgcctatatgggggagatctttcgtgcgggtatccagagcgttgaaaagggtcagctcgaggcctgccgtgcgctaggaatgagctacggtcgcgcaatgcgcttagtgattgtgccacaggggatccgccgcgtgcttcctgcgttggttaatcagttcattgccatcatcaaagactcttcgctggtctatctgctcgggctgatggtcaacgagcgcgaactttttcgcgtcgggcaagatgccgcggtgctcaccggcaacctttctcctctgatgctcgcagggcttttttatctgataatcaccgtgccaatgacccatctggtcaactatgttgaccaacgcttccgcaccggccgtcgcaaaatgacgcgcccggtcagcagtctgaaagaggtcgatgagctgcaaaaacttaatcctcgcaccgttgccaccggcggcagtgcccccttaaccaccgaacggggacaataatccatgacgcttgctgccctaatattgaccgcgccgccacaccgtcgtttcacggcgctagcgtggaaattcgcgatttaacgctggcgttcggcgacattcaggtgctgcgcaaggtctcgctcaacgtcgcgccgggcaccaccacttgtatcatcgggccgtcaggctcagggaagtcgaccctgctgcgcggtattaatcgcctgcatgaaccgcagtccggtgacgtgctggtgtcgggtcgctcggtgctgaaagataaacctgacgccctgcgtctgcgcatcggcatggtgtttcagcatttcaacctgttccccgaccatacggcgctggaaaacgtggcgatggcaccgtggaaaatcaagaaactgtccaagtctgaggccttccgcctggccgccgagcggctgaaagaggtcggcctagagcagcgagcggagcaccgtccgcgctatctgtccggcggtcaacaacagcgcgtcgccatcgcgcgggccttggctatggaccctgaagtcatgctgtttgacgaagcgacctcggcgcttgaccccgaactggtcaaaggcgtgctgaacctgatggccgacctctgtcgccgtggcatgaccatgatagtcgtcacccatgagatgggatttgctcgcaaagtggcggatcaggtgatttttatggatgaggggaaattgtcgaggcgggcaccccagaacagattttcgataacccgcagtccgcgcgactgcggcgctttttgtctgaagtgctgtgaggcccaacgactcgccgcaccaccgaataccttttatgatgactcaagagaaggaaaacaaaatgtcttcatccactgaacacgcaacgaaaaccgtagccgtgataggcgcgggtatcatcggtatctccagcgccgtgcatttgctgcgtcgcggccaactggtcacgctgtttaccgaggcggagctggtgtccggtgcatcgggccggtcgctctcatggctgaactctgccgccgaccgcacgcgggaatatcatgcactgcgtatggcgggcatcgaccgctaccgcacgctgtttgcacaggactcctctcgtgactggctgcgtttcgacggtggcctgtactgggggaagacaaagctgccgaaacgctgacgcgccacgcctatgaattcgctcacgggtatgattcgcacctcacgggtctggcctcggtcagtcaaattgaccctcaggtcagggccgaagccgtcgctgaaagcgcactgtttaatccgggtgaaggctgggtcagcctgccacacctcgccaattatctgatggccgagtttcaccgcctcgggggacagctttatgaatatgcgggcaaaacctcggtcatcaccgatgccagcggtaaggccgtcggcgtgaaaactggtaacggcgaaaccttcagcgcagacagagtgctggtggcctgtggcccgcaaacgcccgaagtggttgcgccgctgggtgtcactatccccaacggctccccttatcgatgctggtcatcactcaaccggtcgaaaacagcgtgaaagtggtgctaaacacgccacgagttgcggttcgtccgaatccggggaaaaccctggcgctggaccatgactggtatgagtcggccattacccgcagcgcggcgggcgagtacagcattcccgaaaccgtggttgatgaattggtggccgaggcggcgaaagtgctcgaaggcgcagaatcactgaaggcagcgagctggaaaatcgggctgaaacctgttcccggtgacggcgagccggtgctgggcgagctgcaaagcgtgccaggctgctacgtggcgtttacccattccggcgccacgctggcgcttatcgtcggcgaactgttggccagcgaaattgccagcggcgaaaaacatccgatgctggccaccttccgcccgagcgtttcactgcctgagtgatttctcgctaggcaggctggtgatgacttgatataaattgctgaaaacgtggggatccctgctcgccaaacaggtcgtgcgggttcccagacagtctatttcaccctgatgcaagaacaccacccgattggagacgcggcgggcaaagaccatctcatgggtgaccaccagcatggtcctccctcctctgccagactctgcatcaccttcaagacctcccccaccagctctggatccagtgccgaggtgggttcatcaaacagcatcacctcagggtccatggccaacgcgcgggcgatcgccacccgctgcttctgtccacccgaaagctgtgacggatagaagtccttacgctcatacaacccgacgcgggccagcagtgattcggctttctcgatgcaggctttgcggcttttcttctgcacgtagcgtggcccttccatcacgttttccagcacgttcatgtgtgaccagagattgaagtcctgaaacaccatgccgagtcgcgtacgtatccgttccacctgtttgcggctggcaggctgcggattgcccctggcgtcaggcttcatcaggagtgtttcaccgccgaccgccacggtgccggagtccggcgtttcaagcaggttgatgcagcgcaggaaggtgcttttgcctgaaccactggccccaaaatggagataacctcgccctgccgtgcgtcaagtgagatacctttcagcacctcatgctcgccgaaggatttgcggatatcgatcatcgatagcgtgataggttgcattattggcgcagactcctgtgaaaatctttccgtggggtttcaggacaagattatgcaagaacagcgccaatcccctcgaccttgggtaaatcacgtcgagggcggcgagagcgttagttgagcggcatgcgctcagggtcaggatactggtactcgaagccgagctctttcacgatgcggctaccgtcaaccagcttacccgccgaatcttcaggctcgggggcgaacgtcggttcgggaagccccaactggcgcgctaacagcggataaaactgctgtttagccggatgtgcaggcgcgcaaaggttaaaggtgtgaccgccgcgcggcaggctcagcaacagctgaatggcagagaccacgtcgtcctgatgcaccagattaacgccatgatttgcacctttaacgtctttcttgcccgccaggaaacggcccggatgacggtcggccccaaccagtccggcgaggcgcagcacgtcaacggaagtgttcggcaactgatggaaccactcctccagctctttgagcaccttgcccgctggcgtgacgggattcagcggcgagttttcgcgcacagtgcctgtcccctcgccataaattgacgtcgagctggtaaagataatgcgcggtacggcgtgcgccagtgcactatcaaccagcatctgcaccgcctgaaaatagagctcgctcccttccaccgtgcgccttgcaggcagggtaatcaccagcgcatcgacgttgagcagcacatccaggtcgtcagcgtcgcattccagcgtcatctcgggcgtgaaggtcatttggtagcattcgatgccgctcatacgggcggcctcaacgccgtcacgcgtggttttgctgccaacaacctggtatcccctggcgcttagggcaatggccagcggcatacctagccagcctaaaccaattattgataccttcttcattttgttctccaatacctacccgcttttaataaagctacgtcatttagtttagcaggctacctccgccacctctcttaaacaacggcttattatgtaatgattttcaacagattgtcagaacgcgagcgtgttgcgcctgtccggtcttctatacaatcgattcatgcttatcattacatggccaataatattaaaattattcatcagcagaaaaaaaggttgcgcgtcagagcacggtggtttaggttaattggcaacagatttagaacctatggctgataacagcggtaggcaacaaaacgcttagaagagaataagacaatgctgaacattctgatcaaccaccatcaccaccatcatcctgactagtctttcaggcagattggtgctggaagacttttaagatcttccagtggcgcgcagaatgtagcagagagcctcggaagatttcttccgggggtttttttttaccctaagaaatttaaaaacgaattaaatcataaatttaaagacagaggtcatcatgctggacaaaaaccgtttacgtatcgcaatgcagaaatccggtcgcctgagcgacgattcacgtgagctgcttgcacgctgcggcattaaaattaatctgcaagagcagcgtctgattgccttcgccgagaacatggaaatcgacattctgcgcgttcgtgatgacgatatcccaggactggtgatggacggtgtggttgacctcggtattatcggtgagaacgtgctggaagaagagctgctgagccgccgtgctcagggtgaagacccacgttatttcacgctgcgtcgtctcgatttcggcggttgccgtctgtcgctggcaacgccactggactttgattatcaggggccacagagcctgggtaacaaacgtatcgccacctcttatccacacatcctcaagcagtatttcgacaaaaagaatctcgacttcaagtcttgcctgctgaacggctccgttgaagtcgcaccgcgtgccggtctggccgacgccatctgtgacctggtttctaccggcgcaacgcttgaagccaacggcctgaaagaagacgaagtcatctaccgttccaaagcctgtcttatccagcgtgacggagagatgccgcagtccaaacagctgctgatcgacaaactgatgacccgtattcagggcgtgattcaggcacgtgaatccaaatacatcatgctgcacgcgccgagcgagcgtctggacgaaataatcgccctgctgccgggcgccgagcgtccgaccattctgccactggctaacgacaaacagcgcgttgccatgcatatggtgagcagcgagaccctgttctgggaaaccatggaaaaactgaaagcgctgggtgccagttcgattctggtgctgccaattgaaaaaatgatggagtaaggcgatgcaatccaacggattttctaccccaatcgactggcaacagtgtgatgaaaagcagcgcagcgaactcctcactcgccctgctatcgcagcttcaggcagcattaccgagaccgtcaccgagatcctgactcgggtacgtaatgaaggcgacgttgcgctgcgtgaatactgcgcgcgcttcgataaaaccgacgtggaccagattcgtgtcaccgccgagcaaattgaacaggcgtcagcgcgtctgggcgacgatgttaagcaggcaatggccaacgcagttcgcaacattgagacattccacgtcgcacagaaattgccgaaggtggatattgaaactcagcccggcgtacgctgccagcagattacacgtcctattgcttccgtcggcctgtacattccgggcggatcggcgccgctgccttctacggtgctgatgctggcaaccccggcacgcatcgcgcagtgcaataaagttatcctttgctcgccgccgccgattgccgatgagattttgtatgccgccaagctgtgcggcgttaccgaggtctatcagctcggtggagcacaggcgattgccgcgatggcgttcggcacagagagcgtgccgaaagtggctaaaatttttggaccgggcaacgctttcgtgaccgaggccaagcgtcaggtcagccagagcctgaacggcgcagctatcgatatgcctgccggtccttcagaggtgttagtgattgcagattctggcgcaacgcctgatttcgtcgcctctgacctgttgtcgcaggcggaacacggcccagattcgcaggtgatattgctgacgccagacgccgagatggcagcagccgttgcggtagccgtcgagaaccagctgcaaacgctgtcgcgcagcgagattgcccgcaaggcgctcgccagcagccgtcttatcgtggcaaaagatttggcacagtgcgttgaaatcagcaacgcctacggccctgagcaccttattctgcaaacccgtgagcctgaagcactggttgacagcatcaccagcgcgggttcggtattcctcggtgactggtcacccgaatctgcgggcgactacgcctcaggtaccaaccacgtattgccgacctatggttataccgcgacctgttcaagcctgggtctcgccgatttccagaagcgcatgacggtacaacagctgactccggcaggcctgctggcgctggctccgacgattgaaaccctggctcaggccgagcagctgaccgcgcacaagaatgcggttaccctgcgcgttgccgccctgatggagcgtaaataatgagtgagacttcgaagcaaaacgtttcagtcgttgcactggcgcgtgaaaatgttcagcagctgaccccttatcagtctgctcgccgtctgggcggtaacggtgacgtttggctcaatgccaacgaatatgcgctggccccgcattttgaactgaccgcacaaacgttcaaccgctacccagaatgccaaccgaaggacgtggttcgccgctacgccgcgtatgcgggcgtgcagcctgatcaggttctggtctgccgcggtgccgacgaaagtattgaactgttgatccgcgccttctgcgagccaggtaaagacgccatcctttattgcccgccaacctacggcatgtacagcgtcagcgccgagacgttcggcgttgagggccgtaccgtgatggcgaaagaggactggcagctggacctcccggctatcgagcaggcactggacggcgtgaagctggtctacgtgtgcagcccgaataacccgaccggcaatctgattaatccagaagacattcgcagcctgctggaaacgacgcgcggcaaggctatcgtggccgtcgatgaggcatatatcgagttttgcccgcaggcgaccgtggccggctggctgaaagactatccgcacctcgctatcctgcgtacgctgtcaaaagcctttgccttggcaggcctgcgctgtggctttacgctggctaactctgaattgattgacgtattaatgaaggttatcgcgccttatccgctgtctacgccggtcgccgacatcgccgcgcaggcgttgagcgagcagggcctggcgttgatgcgcaagcgcgtggcggaggtgagcgagacccgtgaatggcttcgtcagcagcttgagcagtgcgactgcgtcgagcaggtgtttaccagcgagagcaactatcttctggcgcgctttactgcctccagcagcgtctttaaaacgctttgggatcaaggtattatcctacgcgaccagaataagcaaccgggactttcgggctgcttgcgtattactatcggcacccgtcaagagtgccagcgcgtcattgacgccttacgtccattaccgggcgcgacttcaaccgttcgtgaaacaagcagcgccagcaaggagccaatgtgagccagacccctgtgagtcaaaaagttctctttatcgatcgcgacggtacgctgatttccgagccaccggaagattttcaggtcgaccgactggataagctagcctttgagccgggcgtgatccctgcgctgcttgcattgcagtccgccggtttcaagctggtgatgataaccaatcaggacgggctgggcaccgcgagcttcccgcaggaaaccttcgacccgccgcacaacctgatgatgcaggtgctgacctcgcagggcgtggtattcgacgaggtgcttatctgccctcacctgcccgccgacaactgcgactgccgcaagccgaaaacgcgtctggtgcagcggtacctcgagaacggcgtgctggacacggcgaacagctacgttatcggcgaccgtgagaccgatatccagctggcgcgtaatatgggcatcaccggtctacgctatgagcgcgacggcctcggatgggccgctatcaccgagcaactgacccgacgtgaccgccacgcgcgcgtcaaccgcgtgacccgtgaaacggctatcgatgttgaagtctggctcgaccgcgaaggcggcagcaaaatcaagactggcgtcggcttctttgaccacatgctggatcagattgcgacccacggcggttttcgtatgaacatcgacgtgaagggcgatctgtatatcgacgatcaccacaccgtggaagataccggtctggcgctcggtgaggcgctgcacaaggcgttgggcgacaagcgcgggattggccgttttggcttcgtgctgccgatggacgaatgcctggcgcgctgcgcgctggacatctccggccgtccacacctcgagtacaaggcagaattcaactatcagcgcgtgggtgacctgagcaccgagatggtcgagcacttctttagctctctttcttacacgatgggctgcacgctgcaccttaaaaccaagggcaaaaacgaccaccaccgggtagagagcctgtttaaagcctttggccgcacgctgcgtcaggccattcgtgtcgacggcaataccctgccgagctctaaaggagtgctttaatggacgtggttatccttgatactggctgtgccaacctgttttccgtcaaggctgccgtaaaacgactgggctatgagccggtcgtcagccgcgacgccgacatcgttctcaaggccgacaaactgtttctgccgggcgtcggtaccgcacaggcggcgatggaacagattcagcaacgtgacctgatagagcttatcaaggcctgtactcagccggtgctgggtatctgcctcggcatgcagttgctggcttcaagcagcgaagagagcggcggtgtgccgatgctggatatcgtcgagacgccggttatcaagatgcctgagcgcggcctgccgctgccgcacatgggctggaataaagtgacggcgcaggccggacaccacctgttccgcggcatcgatgaaaatgcctacttctacttcgtgcacagctacgcgatgccggtttgtgaaaacaccatcgcgcagacgctgtacggcgaaccgtttaccgccgccgtgcagaaagataacttctttggcgtgcagttccaccccgagcgctcgggtgccgcaggcgcgcagctgctgaaaaactttttggagatgtaaacagcatgattatccccgctttagatctaatcgaaggcagcgtggtgcgtttgcatcaaggcgactatggacagcagcgtgattacggtaattcccctctgccgcgtttgcaggattatcaggctcagggtgccgaagtgctgcacctcgttgacctgaccggtgcaaaagacccggcagcgcgtcagatcccgctgcttaagcagctggttgctggcgtgagcgttcccgtgcaggtaggcggcggtattcgtaccgagcaagacgttgaagccttgctggaagccggtgtctcccgcgtggtggtcggctcgacggcggtgaaaaacccggagcaggttcagcagtggtttacgcgttttggcgccgatgcgctggtgttggcgttggacgtgcgcatcgacgacgcaggcaataaacacgttgcggtaagcggctggcaggagaactcagactcgacgctggaacaagttgtcgaacagttcctgccgtttggcctgaagcacgtactctgcaccgacatttcccgcgacggcactctcgccggttccaacgtcgagctgtatcgcgaagtctgccaacgttttccgcaggtggcgtttcaggcgtcgggcggtatcggcagtctggacgatatcgcggccctgcgcggcactggcgtaaaaggtgtgatcgttggccgtgccctgctcgacggcaagtttaacgtaacggaggcaatttcatgctggcaaaacggataatcccctgcctggatgttaaagatggtcaggttgtgaaaggcgtacagtttcgtaaccatgaaatcatcggcgatatcgttccgctggctaaacgctatgccgaagaaggcgcggacgagctggtattttatgatatcaccgcctcctccgacggccgcgtggtcgacaagagctggatttctcgcgttgctgaagtgattgatattcctttctgcgtcgcgggcggaatcaaaagcattgaagacgcgggtaacatcctacagttcggtgccgataaaatctctataaactccccggcgctggccgatccgacactgatcactcgccttgccgatcgcttcggcgtacagtgcatcgtggtcggtatcgacacctggcacgacgctgaaaccggcacgtatcaggtgcatcaatttaccggcgacgaagcgcgcaccaaggtgacgacctggcagactatcgactgggtaaaagaagtacagcagcgcggagccggtgaaatcgtgttgaacatgatgaaccaggacggcgtgcgtaacggctacgacctgcgccagcttaacgctattcgtgaagtctgccacgtgccgcttatcgcctcgggcggtgcgggaacccgtgaacacttcctcgacgccttcaaactggcgagggtcgacggcgcactcgctgcttccgtgttccacaaacaaataattaatatcggtgagttaaaacgttaccttgccgaacaaggcgtggagatccgcttgtgagtattccagaacaagataaagaagtgaaagccccggttattctgaacgccgaacaactcgcccagcttgattgggaaaaaaccgacaacatgatgcccgctatcgtgcaacacgccgtttcgggtgaagtgctgatgatgggctacatgaatcaggaggcgctggacgtcacgcagtcgagcggcaaagtgaccttcttctcgcgcaccaaacagcgcctgtggaccaagggcgaaagctcgggcaacttccttaacgtggtcagcatcacgccggactgcgataacgattccctgctgattctcgtcaatccgattggcccaacctgccataagggcaacaacagctgcttccaccctgccagcagcgactggggtttcctgtatcagctggagcaactgctggcgtcgcgtaaaaccgcgagcccggacagctcctacaccgccagcctctacgccagcggtaccaagcgtattgcgcagaaagtcggcgaagaaggcgttgaaacggcgctggccgctacggtgaatgaccgtttcgaacttaagaacgaagcctcagacttggtttatcacctgctggttctgctacaggatcaggatctggacttcagcacggttatcaataacctgcgcgaccgccacaccaagtaacggactctgagcacaaaaaagccgccgaaggtattctccggcggctttttattgactaacactatttgaacttattgataatccagcgtagtggcgcagtaattttccatgagttggagctgaccaggcactctatctgggcatctctggcctgcagttctttcaccaatgagctgagcagttcgctttgctgagaaagcttctgatctttctcaaacagctcggcctcatagtttgtacgaatactttcatgctcgccaatcaacagttccttagcggccttaatttcctcgagcgtcaggtttgcgctgtgcgcctcagaggttaaatactctaccctgtcaataaactcgtcaatttccttctgtgcctcagcatgcctctcttcgagtgacgcaattttgttgtgtgactcttcaatatctacgccaagtttcaaccttaagtagaacaaatactcttcagcacagtgttcgagaataaacagataggcgtcataaaacggctgataatagatttcttcacgggttatgttcagcgttgcaaagaactgtttcaccccatcatagagttctctgtaggcctcctggccaatagagttgatattccagatcaggaagttaagcacatagtttttgaaatctctctcgtatctttcataaatgccctgctgctgcataaattctttcagcgcaacggtggcttttagacagcaatcgtaagaaagatggcgcgtgctcgagagcgagctttccaatttttggcgctgaaaaaccagaggttgcttggtataagctattctttcggccagaagcaccgctgatgaggtgaaaagcagatcgttgctggttctaatttgctgaaatttcagaccgtgtttttcaataaacgaccgacggaacagtttgtcccaagcccaccaaataaagatctggaagaaatcttctttgacatcattagcacaaaatacgagcgagtcaggaagtaaatgctctttaatagtccaggacatatctgactcttcacccgtcgcttcgttaaatgccctggcaccgaatacaaagacgtcgaggttgagttcatcggcacgttcaaccgagattttaaacatatcaggagtgaaataatcgtcggcatccagaacggaaaaatattcgccggtagcgatttccattgccgtatttctggccactgcggccccaaggttggtactttggcgaatgatttttattctattatcttttgcctgaaacgcctgaagaatttgcagagagttatcggttgaacagtcgtcaatgcagataatttctagttcggttaacgtttgtgacgtgatggactcaagacattgctctaaaaaacgagaagcattatagacgggcaaaatgacggaaactttgggtttaacactcacgttctatcctcaaattatcctgaaaaggacaatacctataagttatcgtaagacaatatactcctttggaataataataggataggactgctccggttagtagcaatattgaaaatcgctaaaaatcgggcataaaaaagggccagtcgcctggccctctttgaaaacttagtccaaccactcggtgtggaacacgccttctttatcggtacgcttgtaagtatgtgcgccgaagtagtcacgctgtgcctggatcaggttagctggcagaaccgcgctgcggtagctgtcgtagtagttgatcgcagcagagaaagtaggcgtcgggataccgttctgaacggcataggacaccacgtcacgcagcgcttgctgatattcgtcagcgatgtttttgaagtatggcgccaacagcaggtttgcaattgacgcgttttcttcgtaagcatcggtaattttctgcaggaactgagcacggatgatgcagccagcgcggaagattttggcgatttcaccgtagtgcaggttccagttgttctcgtcggaagccgctttcagctgagagaagccctgcgcgtaagaaacgattttacccaggtacagagcacgacggattttttcgataaattctgctttatcgcccgcaaatgctttaaccgctgggccagtcagaactttagaagccgcaacgcgctgatctttcagagaagacaggtaacgggcaaatacagactcagtaatcaaagtcagtggctcgccaaggtccagagagctctggctggtccacttaccggtacctttgtttgctgcttcatcaagaatcacgtctaccaggtagttacccgcttcgtctttcttagtgaagatgtctttggtgatgtcaatcaggtagctgctcagctcgcctttgttccattcagcgaaggtggtagccagctcttcgttgctcagattcagagactgcttcagcagagaataggcttcagcaatcagctgcatgtcgccgtattcgataccgttgtgaaccattttaacgtagtggcctgcaccatcagcaccgatgtaagctacgcaagcgtcgccatcgtcagcacgggcggcgatctgctcgaggattggagcaaccagttcgtaagcttctttctgaccaccaggcatgatggaaggacctttcagcgcgccctcttcgccaccggaaacgccggtaccgataaagttgaagccttggtcggaaagttctttgttacgacgaatggtatctttatagaaggtgttgccgccatcgatgaggatgtcacctttatcaaggtgtggtgtgagggatgcgatagttttatcggtcgcttcacctgctttcaccatcagcagaatacggcgtggtttttccagtgactcaacaaactcttcgactgtgtagtatggaaccagatttttacccggattctcggcaacgacttcatcagtcttatcgccagaacggttaaaaatagcaacggaataaccacggctttcaatgttaagcgcgaggttacgacccattaccgccataccaacgacgccgatctgttgtttggacattagcaactcctgtctgaaatagttgatagctcggtggaactcaaacccctgttcttagtaggtttatcctcaccgcgccatacaaatgaacccaagcattgtacatgagaatgactgagggtgtacctatcacagctataactatcacaaccattcaagtggtcggtgcagtttagcctcagccaccatgccgagcatttgacactttaccggtaacaacgacgaattgcaggtcaaaaagagcgaattttttaactttgagattacatttagagcagaacgaaataaccgacttttcccaaatacgtattgaacagtttacgctctaattttcaactttgctggtgaggagcatatcaataagcttaggaaatgggaaaaaccgaagcacctaaaaaccatccttgccaactctcttttgagcaaagagtaaaaccaaggcgtaaaaaagccccgaactcctcagagtcggggctttttataaactaaagcagtttaataaggaggtattacaccccctcgtataacctcagcgtcttaacaataacttgagcagacgagaacttagtcaaggctaactctctgccgactaaccccattttgtggcgaaggggcgcgtcctgaagcagtcttttaagttggctctcaaggccagccttgtctttcctagcaacaagaaacccgtttgctccgtcctgaacaatgcttttacagccaccaacatcatacgcaagacacgctctgcccatcgacgccgcctcgagcagtattctaggcacccctctgaataggtagagggaagagcaacaatattagccgcctcaatcagctgactcacgttgttacttctgccaagccagttaattgtcccttctttatgccattgttcaagcatcgagagtggaatagcatcggcatcgtcagtggataaaattcctgcgacgttcagcgtgaaatgaatatcgtcctttgccagagacttcctcacgctaatgaggtcgcgtagccctttgctccacaacatacgacttgcaaagaggacgacaggaggagtctgaataggttccgatgtgtagggataatcatcggtgttaatgcctgcgccatcaatcacccgagtttgctctttatcaatacccgtcagtgaaatcagtcgctcctggtcggattcatgttcaaataccagcaccgcctgaggattttttgcaatgtatttataaatactcaatacgaaaaaccgcagtccgttgatcaacatttttccattgtcgaaaacccgccctaacccggcaaaactgagaataacgggcctagattttacctgtgcatagattccaccggccaaaaatgacttgattgtgacgcagtgaagaacgtcaggatcgagtctatttagcatcttccatattcttgagaaagtcagtatgaatccaacaggattataagactgggcagaaatcagtgagttatggcaaataaacccatgtttctcgaggcgtgatttaatttcatctccctcatagtggcagataacatgaacctcatacccgcggccttggcagccaatgcacgctctgaccaatgcagctcaaaataccaatcggaattgatcaagtagcaaacttttttcatcagataccaccaactagtgttttttgccgcttttattggatatgccgtcagtgatccctttaaaaacgaagtgaagataactcagtttctgttcctgcttaatagttaaaacgagatacttcaacactctgatcattatggccggcgtcgaataagcccggagcgaacgggaaagatagcgagccaaaaagagattgcgaactaaataatagactttccaggtaggtgaaatagtttttacgccaacgggaatatcatgcttaaacaccacttcaggcgaatagcgaattttgatgcctttatccgttagtgctttggacaaatatagatcgtcataatagataaatagttctgggtaaatactattaatgttattaactagaacccgcttgtcgatgatcaagccgacaaaagagaaactcgccacggtctggctacaatgttcattcggcaagaaacgttgtggtgcacgaatatagctgagggtatcggcaaaggtcgacgggaatttggcataaggaacgttcatcttgcacaaattgccgtctaagtcttcaacgcggcagcaataggcctgatattcgtcgcttctaatagaagaaaagttttcaagcaaatcgacagtgggataggcgtcgtcgtcataaagcgcgacaaaatcagcctcaacctgttggtcaatatattgaataccgaccttgaagccaccggctcctccggtgttatcttgcagcgtgataactttgaggcgcgagtcggtaatactcgccaaccactcggcggtattatcggttgaagcgttattgacaataatgatgtcggtgaaattaagggcagctgacgctgcccaacatttttttagcttttctagtcgattaaacgtgactatcagcgctaccaatttcattttacgtcaaccgtgaataccggcatatcagtgtttgccgcggcggattgcagataaacatcggccgttttcaatgcttcagcaatggtcacgtccatatccagatagcggtaagttcccagacgaccgatgaaggtgatgtctttttccttgttcgccaattcgagatacttatccagcagtgctatttccccacctgacggattggatagtaaggaatatcgttttcctcacagctgcggctgtattctttataacatacagatttctcatggctttcccatggagaaaaatacttgtgctcggtgatgcgggtatatggaacgctctgctcgcagtagttcattaccgccgtaccctgataatcaccttcaaccgtaaatttgtcgaaatcgagcgtacgatagcccagacgaccaaacctgtaatcgtagaatgaatccagcgcaccgctatagaacacgtggtcatagttttcgcgttcagctacatcgaaatcggtgtttagctcaaccgtgatatttggatggtttgcaattttctcaaccatatccgtgtagccgtcttttggcataccctggaatttgtgattgaagtagttgtcatcgtaattaaaacgtaccggcaaacgtttcaggatagacgcgggtaattccgtcggcgacatgcccactgcttgatggtatagcctttgaagaaagcttcataaagctctttacccacaaagcgcaacgcctgctcttcaaaagtcttaggatcggtgatacttgaatcacccttttcttcaatcagctgtttcgcttcattaggcgaacaggttttattgaagaactgattaatggtatgtaggttaatcggcagagagaaaacccgaccgccgtaggtcgcttttacccgattaacataaggcatcatggtggagaattcgttaacgaaattccagaccacttcattatcagtatggaagatgtgcggtccgtaagtgtgaaccattacctggctctcttcatcgcgcgcatcgtaacagttaccggcaatatgagagcgtttatcgataatacggactttatgaccttgctctgccagtttacgaccaattaccacgcctgagaaaccagcaccgactatcaatacatttttatttgtcatttataactctctcacttaacctaaaacgatgcgtctaattttataatacagcttgctgatagaacttctgcgctgagagccgatcggcgcaaatcgattgaaatacggcatcagtttgcgcttaactttggtctgaagtaatacttttggcatcggcatcgccgggttggaacttatttttccatgagacagcaagcgctcataaacgtccttttcccaaggcgtattgtggacgttcttcaggaagttatcgaagaagtcgacatcagcggtattccaaggtttattctcacccgcatagtgaatcatcttcggatgcatacgcgcttcaagaaaactcatataggtagagagtttcagattcgggaagaagtcgtcggtattaccgttaccatgatagacgttccagcacagcggcagatagtgcacgcggtcatagaacactttattcatgatgtcctgatccaggaaccagtaaacctgcccgatcatactttccatcagcttggcgaaggtattctctttgttcatttgagcaacattgaagagaataatacccgcctggaaatacttatctggatcttccatctgcagacgcgttttcagatactgtgacgcagtctgaacaccggtttcagactgcgcaatggcgttaaatttaacaaacccttccatcacgatatctttaacggcagcgactaaattgttaccaatatcgagctcaagcaattcggcaacgtcactttctaccacggtatcggcatcgatgaacaagacgcgtggaaagtttttaaacaactgaggaataaacaggcgcgcataggttgcagcactgaagtgggcgcgcgtgtatacgccttttagctcagtgaaagcattcacgtcaaagaaacgaatactcatattcggcttgtctttaacgagatcttttaaacgccccttgttgcgttgcgaaaccccattttcaagaataacgatgtcatagtttttatcagcatggctattacgcgcaatagaattaatcagcgcgccgccgctcatcgcatagttatcatcgaaacagatgacaacgggcacagcattactatcataatacggctgcagtacaccgttaaaggtttcctgagagataaatgtacgctgaacttccttcatcttcagggctgaaaccgaagatttataaataataaagatattgaacaggcgctctgaaatatggccaaccacccttttttcttgtgcattataattatcaaaggatattgcatcttcaagttcgctcatgataccgaacagccaggctgaatactcagcaaatagctcacggttcatgacgtacatattagtataataaccgtctgtagcgaagttaaattcttttaccgcctggtagtattctggatgttgtttcaataatatgtcgatagctgcctgatagtctttgatatgcaggtagttcgaaattttgtagtgatcgtagttatttttactgcctgcggctctaacgtcccatttctttggcagtaaaatatcataaccttcaaggcaggaagcaattgccgcatcattcaggccaaacatttcttcatattctgccgtgatctctgggtagttcaccacaccccagttatcttccactttattctgatctgcagagaaattcagatgacggcgataatgcatgaacccgacaaagtcggatagctcggcatttttccaaacccaatagtgcgcggtcagttcgcagtagaacggatttttgaaagaaatattgtcgccagtatcatcaccgacacagcagatttcattaaagctgttagctttacccacgtggattggcttaatgatgtcgctggacaaaaaagcacttggcttgtggtgacaagtataaattgtgatttgtttcattcaacagtccgatgatatcgaattagtggtaattgcttaattaagccatagcttctttatagctggcgataacttcatgcgcctcgccaatttgcttcaatcggtgattctcaatccatatcactttgtcacaaaccttttcaacgtcggacagattgtgacttacaaacaggatggtaacgccttttcttttaaaatcttcgatggtattgatgcacttgcgttgaaaagcaatgtcacctacagccaagacttcatcgatgattaagatatcggggtctacctgactaatgacagaaaagcctagctttgccagcatgccgcttgaataaacgcgaattggctcatcgataaactccccgagttcggagaattcaacaattttgtccattctttccttaagctctttcctgcgcagaccaagcaaaatagcatttagcctgatattttcacgaccggttaattcaggatggaagccaccgcctaattccagcattgacgctacgcggcccgtcactttaacctgacccgatgagggcttcatgacaccggcaacaaggcccagagaagtacttttacccgcaccattacggccaatcagcgcaacggactcgcctttcattacgctgaaattgatgtcttcaatcgcgagatagcttctgccagttagcaggctcaatgcgcgcttcgggttaaagatcagttccttaataccagaaccaatgtgatgataaagcggatagcgcttagtcacgtttacgaattcaataactgcactcattatagtatctctgcaaatctgtattttaatttgttaaatacataggaaccgatgaggagtgaaatgaccgcatagccataaagcatgaaaacttcgtggtaattaatcacgccttccatgaaaagacttctccagctgagaatcatattcgcgagaggattatattcaattaagaaatgatacttctcagggatcatatcgcctgcgtaaagaatcggagtgcagtagaacaacaacataatgccaagtgtgataaatctttcaagatcgcggaagaaaagattcagcgtcgacagcgttaatgcaatgccgagtgtaaaggccatctgtgcaataccaatcagcggcacgccccagatccagtcccatgaaggcgtcattccataaatcaacaggaagacaataataaccggaatggtacagaggaagtgcagacattccattaagacattactgaaaggaataatggaacgcgggaaaactgtctttttaataatttgcgcattcgcaataaaggaaaacaaagagttcgatgtcgagctcgcaaaccactgccacggaaataaaccagaaataataaatacggtgtagttcgggatctgaacacgcatgatcaatttaaaaataaagtaatagatcatcgcaaagagtaacgggttagcaatcgaccacaaatacccaaaaaaactgcttttatatctgacttttaattctttctcggtaatgaccgttgccaaatcgagaaggtaacctagactatacttcatataactctctgctttgattgaaattttccctgaccgaccgagtgcgtcatagccaaaaacgctattcctttatccccgtatcaggattaatttttttcagttgaccacgctaccgcccctggcctttcggtaaccagagtacgctgcaaaaagagtgctttcgagctaatgttaatcctgcttgaaagtcgagcagttgttataactaccttgagtttgtcgggatagccagtcataaacaccggctaatctacctacacttgcaaaatatctctctaagaatctcccgagaactcgccgttcgcaacgcgttagccaatatcacgataaatcgtatcgactttttcaggctagaagtggtagagatcgattaaaaaatacctttctttatagcgtaaagtcatttgtttagcgcgggtattatatagcatcgtcgagcgattatggagaggttacttggttttatgccagttttagaaaggtaatgatcggcctatcaggcgttgcataatgctacccttgcagcgaccacatcctcgtagctcatagccaggcaaaatcagacaacaaaaaagcaccgcttttgcacggtgctttctcattgttaagcattatcttcaaaagattatttgcttacgaactctttcaaccactgttcgaacgctgcaccggtgctcttgtgacggataccgtgctcaacaaaggctttcatgtatcccagcttgtcaccacagtcgtgtgaacgaccggtcatggtgaaggcttcaacggtttctttcttcatcagcagcgcgattgcgtctgtcagctgaatttcgttacccgcgccgtaaggggtgatttccaacagaggccaaatgtctttattgaagacatagcgccctactaccgccagatttgatggcgcgtctttacgctcaggcttctcaacgatagctttcatcgggatgcttttgcccgcttcgccttcaacgccgttgcagtcaactacaccatatttagaaacgtcttcttccggcacttcttcaaccataacctggctgtgacccgtttcatcgaagcgcttcaacatcgctgccaggttgtctttgcgcagatcgcaggacacttcgtccatcagcacgtccggcagaagtacagcaaatggtgcgtcgccgatcagagggcgtgcacacagaacggcgtgacccagccccttggactggccctgacgcacgttcatgatggtaacgcctttcgggcagatagactggatctcttccagcagctgacgcttaacgcgtgattccagcatgctttcaagttcaaaagaggtatcgaaatggttttcaatcgcgtttttagacgagtgagtcaccagaatgatttctttgatgccggcggcagcacattcgttaacgatgtattgaatcaaaggcatgtcgacgattggcagcatttcttttggaatggcctttgtcgctggcaacatgcgcgtgcctagaccggcaacagggataacagcttttaacattgtaagagatactcctcaacaccataagattaaaatcagccagcggtttgccatggtttgttcaccgctttactaactgaagatacttaagcaattgttacaaccctaaaaatcacttaagcaaagtatagactctcgccttgcatttggcaggttcatcgacagtcccttgcctgtataagatgttgtcttatcactatgaaattctttgtagcctatgcaaatgtcgttacaacgctaactacaaacaacaacataacagcaagttaagtatgaccttaagtcaaccataaaaaaataagattgttacccaagaaatgattttttttaataaaaaccgacaaaaaaacgtcttgtcctcctggtctaagtctgtcattgccgaccaaaccaccagatcgctggaaaagccaccgccactccgtttttggtctcccggcgcaacgctaagtattcccctttagctgtctgatttaaatttgaaatttacgttgccaacgaccattattcattttgcggacttcgccgcgacagtgaaggtaaataagcgatatggaatggattgccgatccgtcgatttgggccgggctggctaccctggtgattctcgagattgtgctgggaatcgataatctggtttttatcgcgatacttgccgataaactgccccgaggccagcgagaccgcgcacgcgttaccggtcttctgcttgcgttggtcatgcgactcctgcttcttgcctcaatctcgtggctctcgtccctcactcatcccctgttaacaatattcagcaaatccttcagcgcccgtgacctgattatgctggccggcggccttttcctgctgtttaaagcgaccaccgaactcaatgaacggctcgagggtaaggatgaggagaacactcaacagggaagtcgtgcccaattctggcctgtcgtggcacagatagtggtgctcgacgcggtattttctctggactcggtcattacagcggtcggcatggtcgaccaccttgccgtgatgatggttgcggtctgtatcgccatcggcctgatgctgctcgccagccgtccgctgacgcgcttcgtcaatgagcacccgaccatcgttatcctctgcctaagcttcctgctgatgataggttttagcctggtggcagacggctttggctacaatatccccaaaggctatctttacgcggcgattggcttctcggtcatgatagaggtgctgaaccagctggcgcagtttaaccgccgccgcttcctgtcttctcgtcgctcgctgcgcgaacgcacggccgagacagtactgaaggtgctgcgcggcaagcatgaggaggcggatctcgactcgcattcctctgatatggtcgccgatattgctaacgaagacgacgctatctttaaccagcaggaacgcaaaatgatcgagcgtgtgcttgggcttgccgagcgatcggtcagtagcgtcatgacctcgaggcacgacgtcgataatctcgaacttaacgacccacccgaggtgcaaacccgtcagttagtcaataattctcatacccgtatcctggttaccgaagacagttccaccgatgcaccgctcggcgttatccacgtcgttgacctgctcaagcagcagttgctgcataacgaactcgacctcaaggccatcatcaagcagccgctgattttcccggagcagctttccctattggcggcgctggagcagttcaggcaggccaagacgcactttgccttcgtggttgatgagtttggttcggtggaagggatagtgacgctgaccgacgtaatggagaccattgcagggagtctgccggaatcgtcggccacgctcgacgcgcgccacgatatcgttcaacttgaggacggcagctggatagccaacggttatatgccgcttgacgatctggtgacctatttgccgctgccggtagaagagaagcgcgaatatcatacccttgccggtctgctgatggagcacgcgcaggtcatccctcaccagggcgcacagctgtatatcgataactacctgtttgaaccgatcgaggtgaacagccaccgcattctcaaggtaaagataacgccgttaaagccgattgccgatgattatgaagtgtgagcacgaaggggattaaacgcgacgggcctgatgattcaggcccgtgcggcagggaaatcacatcttgttaatgaatgacttcactttgtcgctgttcttgtcgtctttgtttttatcaatccagttctgaattgcatttttcgcatcctgctgcagctgttgacggaggatctgatccacccgcagctgatagttaagctgtttccacggaccaaatacgcgcagcggaatctcggttttttgcagcgtggcaatcaaatcgttgtcaccctgccagccgccggtgattttcacccgcagattcatgtcggcctgttcgtctgggaagttaacctgtccgtcgcccttcacgctcatcatcgcggaatccgccgacagattgctcagcgtcagtacgccattgcgcaatgcgccgtgggcctgcaattgctgaatatcgctgtagacctcgtagcgttgcataccctgaacgcggttattgctgcggctcaccgcctgctgcaccaactgctgaatattcaagccattcagacgcgcattgtccatcgacatttgcgcatcgccctgccagttgctgttgaagtcagtcagcgacaggccttttccgctcaatgccccgtgcaggctgaagttgccgattaacgcctgcggcaaattgtaggcacgcagcaaatcacctaacggaatgttgctgaggtccggcgtaaagttgaccagcagacgtgggccagtggcgtctagcgcgcccggaagcgagaacgttccctgccccatattgccgctaagccgcgcaatcttgacgttaccggcctgattggttgcctgcaaatcgagattctgaatttttagcccgcggtaggtcacgtcaacggccttgagcgctacctgagcattaaagccggtcagcacgttcagcgagtcctgctgcgcatctatatctctggcaataaccggtgccgacgtcacggactgcgctttctgctgggcgctgccggtgccgttaggctgccacccggagatagcgtccagattcacgttgttcgactgcaaattcagctgatagtccggcacatcgttgagcaccgccacgccgctgccggtcagctgattatcattcgccgacagcgcgagctggttgagcgtcatggtgttattagactgttgatattttgcctgcaggctgccctgccccgagacgccctgcgcaggaatgtccgcgccgctgagcttataggtcaggctagtaatattggccgaatactggcgcggatagttttgcatatccagcgtcgcattgaggctcagcgtcaggtcacgctgatcgcggttgatgcggctcgacagctgtacggtcgcctgacgacgatcgttctgttccatctgcagattaatgtcgcgcacgttgatctggtcgctcttggcacgctgccagatgagcaggctgtcggcaacgttgagacggccgatgtcaaatttccagccatcgtcatcgctttcaacgccctggcttgcagaatgcgccggcgcgatgggcgcgtccggctcgttggcttcactgtcaggcgtcaggcgaatcaccgcacttttgagcatcacctgtttaacagaaagctgatgtgagagcagcggcaaaaggcgcacgtcgagacgcatgttttctgcgctcacgaccggctctttggcacccggagcagtaagagacgtttggcccgccaaaatactcagctgcggccagacatgccagcgaaggtcgccatcgattgccagtttataaccgcttctttgttcaacgcgattaaccatgtaattgcggaagtcattagggttaatcaaaaaaaccagcgaggtcataccggcgataataaccaccagtaaaataaccaacgttgtcactaatcttctcatgccatcctcttataagttgcctgcccttgcatcctgccaggacttgtcagtctttatcaatacggctggcaaccgcgctctgctggtcccgatattttgcgtcctgacgactgttataggggcgcgctgccgcaccggataacggttcaaagcttaatgcgccgataagcatccctgggcgcaacgccaaaggcagtttacctgaattatagaattcaagcacgatacggccctgccagcccggatcgatacggtgtgcggtcacgtgaaccatcagaccgaggcgcgccaaagaagaacgtccgtcgagccagccgaccaggtcatccggcagcgtcacggattcgagcgtcaccgccagcgccagttcaccggggtgtaaaaagaatgcttcgccttccggcagaacaatctcgtcactcatgacccggtcgagggctgcgcccacttcatgcttgggaccgcttaaatcgataaaccctgcgttgtgcccaaggaatacgcgaaaaccattgcccaggcgcacgtcaacggtggcgccattgatacgttcaacgggtggacgcggttcaatactcagtttaccgttgtccagccaggcctctatatcgcgatcgcacagtctcattacaactcctttggcacttcttgatgtagtagtcgggcgaaaaaactccgcccctattgctgattgttattcgaagaactgactaatttttgctttcaaaatgtcgattgcgatacggtttttaccgccgcgaggcacgatgatgtcggcatattgtttggaaggctcaatgaactgcaggaacattgggcgaaccgttttctgatattgagccattaccgagtccatagaacggccgcgctcgttaacgtcgcgtttcatgcggcgcatcaggcagatatccagtggtgtatcgacgaaaatcgagaaattcatctcctgacgcagacggacgtcggtcagcagcaggatcccttcaaggataatgacttttttggtgccagcgtcacggtctcgttcagacgtgtgtgctcgatgaaactatagcctggcaattcgatggccttccctgacttcatcgcctgcaaatgctggaggagcagattatggtccatcgcgttgggatggtcatagttggttttaacacgctcttccatggtcagatgactctgatcccgataatagcaatcttccggtataacaccgatatgttcgtcaccgacctgatcgcgtaattcacgatacaaagtgctggcaataaggctttttccagaggcagatgcgccagcgatacccacgatgacacactgatggaacttgtcagacataaaattaacgacctgatttggaggtttgaagggcaagcagcctgatggcgctttgatcgcgccaattataggtacaacctgttgatgaagccagccttaaagccactaaccggctggcttgattaaattaatcagcaaatgtgtgattattagacggcgcggaaggcaatttcggtcggaatggcatcgcccttccaataaagctgtgaggcaactctggaggcgagctgacgatacaggacgcgaactcgctgtcagggttggaaaccacggtcggctcaccgcgatccaggtcttcgcgcagcgaaatatgcagcggcatttgcgccagcagttcacagcggtatttttcagccagcgtctgcgcgccaccggtgccaaaaatcgcctcatggtgaccacactgactacaaatgtgcatgctcatgttctcgatgatgcccaacaccgggaccttgactttctcaaacatcacgatgcccttcatggcatcaagcagcgcgatgtcctgtggcgtcgtcaccaccagcgcgccggtcaccggcacactttgcgccagcgtcagctgaatgtcaccggtgcccggcggcatatcaataatcaggtaatcaaggtcaggccacagcgtatcctgcagcatttgcagcagcgccttgctggccatcgggccgcgccagaccatagcattttcgtcggtcaccagataaccaatggagttggtcgccatgccgtgcgccataataggtgccatgtgctggccgtctggcgaggtcggacgctcctcctcggtgccgagcatgttggggatcgacggaccatagatgtcggcgtcaagaagaccgaccttcgcgccttcagccgccagcgccagcgcgaggtttaccgccgttgtcgacttgccgacgccgcccttgccggagctgaccgccagaatattacgcacgcccttgatcctgggcgatcgttggcgcggcgcagcgtggcgacgtcatgcgacagacgccagtcaacggagcgtgcaccggttacccgcagcagctcggaggtggtgagcaacttcaactgctcgaagcctgatttccaggcaaaaggcatgatgagttcgatgtgcagaacgttgtccattaccacgcactgatgtaacgctttaagcgccgtcagacttttttgtaatgtaggatgggtaaaagtcgccaacaccacgttaacagcggcgtgaagttcagcgggagtaacgttctcaggggattgtgatttcatcccggctccttgaaatacagatttattatggaattcagtggcggcagttaccgtaaactttccgctatctcactgttataaaaatagcataacagaatccctgtttgtttacgtgggtaggctctgtgagttaacatcgatcccccacaatcttaaaaaagaaagcaagctcttactatggctcaagtcgcgaaaaaaattttggtaacctgtgcacttccttatgctaacggttctattcacctcggacacatgctcgagcacatccaggcagatatctgggtccgttaccagcgaatgcgcggcaaccaaactcacttcatctgcgccgatgatgcgcacggcaccccaatcatgcttaaagcacagcagatgggcatcgcgccggagcaaatgattgaggagatgagccaggagcatcagaaagatttcgccggttttggtatcagctacgacaactatcactccacgcacagtgaagaaaaccgtgagttgtcgacgctaatttacagccgtctgaaagaaaatggctttatcaagaaccgcactatttctcaactttacgatccagagaaaggcatgttcctgccggaccgtttcgtgaagggcacctgtccgaaatgcaaatcagcggaccagtacggcgacaactgcgaagtctgtggcgcaacctatagcccgaccgagcttatcgaccctaaatctgcggtttctggcgcgacgccggtcatgcgcgattcagaacactacttcttcgacctaccagagttcagcgccatgcttcaggcgtggacccgttctggtgcgttgcaggagcaggttgccaacaaaatgcaggaatggttcgagtcaggcctgcaacagtgggacatcagccgtgatgcgccttacttcggcttcgaaatccctgatgccccaggcaaatacttctacgtttggctggacgcgccaattggctacatggggtctttcaagaacctgtgcgatcgtcgcccagacctggacttcgacgaattctggaagaaagactccaccaccgagctgtaccacttcatcggtaaagacattgtctacttccacagcctgttctggccagccatgctggaaggcagcaacttccgcaagccgaccaacctattcgtccacggttatgtgacggtgaacggcgcgaagatgtccaaatctcgcggtaccttcatcaaggccagcacctacctgcaacatcttgatgccgactgcctgcgttactattacgccgcgaagctgtcatcacgcattgacgatatcgacctgaacctcgaagactttgtacagcgcgttaacgccgacatcgtgaacaaggtcgttaaccttgcctcacgtaacgccggtttcctcagcaagcgttttgaaggcgttctttccgacaagctggccgatgaagcgctgtacaagacctttaccgatgccgcagccagcatcgccgaggcttatcagagccgcgaatctagccgtgcaatccgtgaaatcatggcgctggccgatattgctaaccgctacgtcgacgagcaggcaccgtggattgtggcaaaacaggaaggccgtgacgctgacctgcaggctatctgctcaatgggaatcaacctgttccgcgtattaatgacttacctcaagccggttctcccttcactggccgaacgcaccgaggcattccttaatagcgaactgagctgggacagcatcgatcaaccgctgctgggtcataaggtgaaaaccttcaagacctgttcaaccgtatcgaaatggacaaagtcaccgcgatggttgatgcctctaaagaggacatcgccgcagccaaagccccggtaaccggtccactggccgacgcaccgattcaggacaccattaccttcgacgacttcgccaaggtggatatgcgtatcgccctgattgaaagcgcagacttcgtggaaggttctgacaaactgctgcgtttgcagctggatttgggcggcgaaaagcgtcagattttctccggcattcgctcagcgtatcctgatccaaaactgctggaaggccgtttgaccatcatggtcgccaacctggcaccgcgtaaaatgcgcttcggtatttcagaaggcatggtcatggcagcgggtccgggtgggaaagacatcttcctgctgagccctgacagtggcgcacagcctggcatgcaggttaagtaatatttgaatcaacctctccctcgcacccgtgagggagagattttccctccggcataatcgtcacaatcttcccgacagataagcactttgtgcggcactcagtcttaatcagcgaccgtagatacatttccctgcgttatcatggtaatccttaccaccacgactctaatttcttctcccaggagctaacgatgtttaacttcgatttttataacccgacccgcgtgcttttcggcgcagatcgcatcgcggatataggtcaacacatccctgaagatgcccgtgtattaattacctacggcggcggaagcgccaaaaagtatggcacgctggatgaggttaaggccgcaataggtgaccgtgtcacgtttgagtttggcggtatcgaagttaaccccatctcgacaccttgatgaaggccgtcgacattgtgagggaaaataaggtcgactttttgctggccgtcggtggcggttcagtggtggatggcaccaagtttattgctgctgcggcgttatatgaaggcgatatctggccgctgtggtcacagcgccagcctttgagcgaggctcttccgctcggctgtgtgatgacgcttccggcgacgggctcggaaactaaccacgtggcggtagtcactaataccacactgggccaaaaatccggctacagcgacccgctgctgttcccaaaatttgccgtactggatccgaccaagacctacaccctgccggtcacacaggttgccaacggcgtcgtggatgcgttcattcatgtcatcgaacagtatctgacgtatccggtttacggcaaagtacaggaccgcttcgccgaaggtctgctgctaacgctgattgaggaagggccgaaggcgctgacagatccgcagaattatgacgttcgctcggcgatcacctggtccgccacgctggcattgaacgggctgattgccgtcggcgtgcctcaggactgggcgacacaccgtatcggccaccagctgaccgcactttacggtatcgaccatgcgcaaacgctggcaattctcttgccggggttgttgcaggtgcagcgcgagagcaaaaaacagaagctgttgcagtatgcagaacgcgtatggaatattcagacgggtgacgacgatgcccgcatcgacgccgccatcgctaaaacgcgtgagttcttcgagttgatgggcctgaaaacgcagcttagcgcctatggtcagccaaaaaccgcgatcgacgaaattctcgataacctcgagcgtttcaatatgttgcctatggggaacgtcaggacatcgacctggcgcgcgctaaggagatcctcacgctgagctactgatgctcaacgccagcagggcgcaaaaatgcgccctgctggttctgtaacatgctcttgcccttgatttttgacccctcagccctcttacgaaagctcggaaagccgctgtgctgagacgatcagctcctgtaacagcatctgccttctctccattggcgtatcgcgactcaccatgaaacaaaatgccgccaccgcgtggccggtgcgcgtgcggataggagccgccatgcagcaggtgaagctgtcggacaggccttctgtcaggtagtaaccctgtgcgcctgcccggtgaatgtcgtcaagaaactcctgtttgtcgatggttcgcccgttggcaagcacgaagtcttcgtccgggatcagcgccaaaatatcctcggcagaccagtcacccagcagcagtctgcccgatgcagtccagggaatgggcaccttcacgccgatgtcggagcttatcttgaacggctgtgcgttgctttctgaaagcaccacctggtacttattgccctcgagcatacacagctgcacggtttcgccgtgtttagccaccagctccaccattaactgatgggagcgacggatgagatcgttgtgggccatgtagtccgcaccgtaatagtgcatttcacgaccgaaaaaaatgttcccttctgcgttggactcaagccatccggcctcagtcaagatgctgaccaactcataaatgctcgaccgcggcgcgcccgtggcgtctatcagttcacgcatcgtcatgggctgacgcgcctgatgtaattgacgaaagatatcaattacgcggtccacgccccttgcgcggggtgcgttttctaccggcatatttactcccttattcatctaccctggctttatcacgctgaagcacatcatacacagtatttaatcgagccgtgaagcgaatcccattaatcacaaataatatgactgcaccaaacggaggcccttatttagggcgaaaaataaaatagcccaaagggtgaaatatcgatagcgatcacaaaatagttatttaaaaaaatccccacaacaacgggttatctatttttcgcattaattaacttataaagccgtggcgctatattgcaaatctatattctttatgcaaatctaaaaacatccggtatcacagacccaagtctgatatatcagacagcaacccaaccctgataacccaattttttgattattaaattgcgcgcttatcgcaatttttggagaaatgcatgtcaattaaacgctatggcaccgaaggtggcgtaggcacagggggcagcgactgccctttgcccgagcggttgaagccgacggctggctttatatctctggccagaccccgatgaaagaaggcgaagtcgttgaggcggcatcgtcgagcagacacggctggcgttcgataactgcctgcaaattatgcgcgaagccgggtatgaggtgaaggacgtagtccacgtgaccgcagtgttaaccgacgccagatacttcagttcttttaacaaagtttttagcgaagtgtttgacgggcatcctcccgcccgcatctgtagcgttcaggatttagtggtcgactgtaaagtcgaggttgatatgaagtgtttccgggccgaccgaaaataataacccagctaaacgccagcgcaattaatcgcggataacatcagcgttattgatatttaaactcacatcacagcatgtcgatttttattacaccgagggtaacaagatgaatcacataaaatataagaagcaagccgcctgtctttttagcgccgtgagtttattcgccttaatgggctgcacaccgaccgaatccaaagattcaaaagcaggcgctgccccaacctccaccctgcaaaccgttttgcaacgcggtacgcttcgggttggcgattgcctgagctttgcgccgtttggtttctatgacaaagcaggcaacccggatggttacgacgtcgacctggcgaaggagctcgccaatgacatgggcgtcaagcttgagatggtcaacaccaccagcgccaaccgaattccaaacctgcaaaccgacaaagttgatgtggtgttctgtaactttacccgcaacctcgaacgcgcgaaggaaataggctttactcagccttacgtcgtcgccagcgaagccctgttggtcaagaaaagcagcggcataaaatccgtgcaggatatgggtggcaaaaccattgcaacggtgaaaggctccaccaacggcgacgaagttcgcgcgatgaatatcaaggtcaatattcaggaatatgactcttcgcaggcggccattctggcggtgaaacagggtcaggccgatgcgatgatcgaggataacaacttcctggcttatcaggccaagctcgacccgacgctgatggtgaccgacgaagcactggtaccgctggaatataacgccttcggcgtgaaggccggcgatcaggtatggcttaactacctgaacgagttcctgtttgaaattaacgcctcgaagaaaaatgctcagctgtaccaaaaatggtttggcaccctgccgcactatccgttgaacccacagtactaattgcccccagacggagatagagaatgagctacccatggataaccctctcccgctatttcggcaccttcgtcgaggcggcctgggtcacactgcaagttaccctgctggcctttgcgttggcgatggcattgggcctgctggcggcgttggcgaaagagtcacgctggtctgtgcttcgtcttattagcggctgctatatcgaagtcatcagaaatacgccggttctgctgcaaatctttatcgtgttttttggcctgccgtcgctgggtatcgtgcttaatgcctacacggcaggggtgattgcgctcggcattaacgtcggtgcctatctggccgaagtctttcgcgccgggatgcagtccattcctaagggacaactggaggctgcgtcaatcttgggtatcagccgtctacaggtatttatcaatatcgtcatgccgcaggccgctcgcgcggtctacccggcgattattaataatcttattcagcttttactcggcacctcactgctctcggccattgccctgccggagttaaccggggtagcgacagtgattaactctcgtactctgctttatatccaaaccttcagcatcacgttggtcatttatctgctgttcagcaacgtcttttcctggataggcaacctattgggacgtcggatgtttaatccaccgctggtgagctcggtaaaaaagcccgttgggtcccgagtaaagcggcgtctgaacgcaatacgtggaaagtctttacccgcaaataatctgcaacgcggaggtctgctatgagcgatttaattctttccagcctgccgctgttgttaaaagggctggtcgtcaccctgctactgtcgattgcctcgatagccggcagtacgctgctcggcctgcttgcagcggtattacgcaccagcaatattcctgtgggcgcacagattgcccgagtctataccgagctgtttcgcggcacgccagtgctgattaccttaatgtttatctattttggcgtggcctatttcggctatgaaatcaatttgtttgccgccgggatcctcggactgagcatttatcagggcgcatacatttccgaagtatttcgcgccggtatcgaagccgtccctcaaggtcagtgggaagtctcgcagatcctcgggctggacaaacggcaggcatttttctctgtcattttgccgcagacgcgcaggatagtgctgccgccgctggtcggacaatatctgtcattaatcaaagacacctcgatagtcagcatgattggcatgtcagaactgatgcatcaaggtcaggcgatcgtcgaccgtatcggtcagccggtggtgatttactgtctggtggccgccctttatttcgctatttgctacccgctttcacgctgggttcaacaccataatcacaccaggagtcagctgtcatgaccaataacgctgtcataacctcaatggcatcaccaaatccttcggcagtacgcaggttttgaaagcgatcagcctcgacgttaaaccgggtgaagttctggtgctgattggggcctcgggttcaggaaaaagtaccgtgctacgcatcatgagcgggctagaaatcgccgacggtggcgaggtgtgggttaatgaagtcccgctgcacgatgcaaagcgcgccaaagagatacgcggccacgtcggcatggtgtttcaacagttcaacctgtttccgcataaaaccgcgctcggtaacgtcaccctggcgcttatcaaggcaagaaaaatgtcggtttccgaagccaacaggcgtggcatggaggcgctggaacgcgtagggctcgcagaccgcgccgggcattatccctcacagctttccggcggccagcagcagcgcgtggcgattgcacgtgcgctggcggtcgaaccgaaaattatgttcttcgatgaggcaacgtcggccctcgacccggaactggtcggtgaggtgaccgaagtgatgcgcggcctcgcccgcgaaggcatgaccatggtcgtggtcacgcacgagatgggattcgcgcgtaaaaccgctgaccgcgtggtgtttatggacaagggggtgattgccgaacagggctcaccggagcaaattttcgttaacccacagaatccgcgcacccagcagttcctgtcgcgcgtgctggaacattaatatgaaccacctttcattgccgccgttgtacaaatcggtggcgggtcagggaaccactccctgccactcggtaccgaggtgctctcctcctcgcaggtgttttcaccgctgatggtcatgaagcaaagcgcgatgcagcataatctggccagcatggcgcaatactgccgtctgcacggcgtccgtcatgccgcacacggtaaaacctcgatgtctccgctgattctacagtccgccgtggacgccggagcctgggggatttgcgcagcgacccccgcacaggtccgcgcccttcgcacctttggcattaaaaacgtgtttttagccaacgagctggtcgaccctgccggtattcgctggatagccgagtaccaacgcgaaaatcccgccaccgagtttctctgctatgtcgactctttagcgggcgtcgcgttgcttgatgcggcgttgagcgaggtgggcacctgcctgtcggtattggtggaggtctcggtgccgggcggccgcactggctgtcgcagcatggtcgaggcggtagcgattgcccacgccgttaagcaaagcccctatcttgagcttgccggtgtcgccggctatgagggcgcgattgccggcgatcgcagcgaggaatcgctagccgcagtgagagactattgccaaaccatggtcagcgccgcccgcgctatcgatgccgaagcgctttttgcgccgggagaagtgttgttaagcgccggaggtggcaccttctttgatatcgtggtcgaaatgtttgcagcggtaaaacttagccgcccgaccgtgacgctcatccgctcaggtgcgtacatggcacacgacgacgggctttattcacgccttgcccttttgcccaaccaaacgctgaattcacctttcaagcgacgttggaaatctggggccgcgtactgtcgcgcccggagccgggtctggctattctcgattttggccgccgcgacgtgcctttcgatcaggacctgccagtgccgcactttttccgcgaccgtgacggttcgcatcctcgcacggcggcgcagagcaccataaccgccgtcaacgatcagcacgcctatcttagcctgcccgccgatctgctgttggcggtcggtgactgggtaggatgcggtatttctcacccctgcaccgccttcgacaagtggcgctatctgccgcttatcgacgatgaatatcgctgcgtcggcgatatcagcaccttcttctgagctgcctcacgacataatcagcccgccgtcgatgttgatagtctgtccggtcagatagcgggcgtcgtcagaggccaaaaacgccaccagcccggcgacgtcctgcggctggccggcgcgttttagcggaataccttgcacccactcggccattaattcccccttggcgtaacgcttctcgtcgctactgaggatttcgccccacacgcggtcgttgtaatcccacatctcgctttcgataatgccgggacaaaatgcattgacggtgatgttataaggagcgagttcaagcgccagactctgggtaatgccgatgacgcccatcttgctggccgcatagtgtggcgtataaataaagccctgacgcccctggcccgacgaggtgttgatcagactccccgcacgctgtttgaccatgattttcgcggcctcgcggcagcacagccagacgccagtggtgttgacggccagcacccgctcgaagtcctgttttggcatgcggtcgaaacgatcgatagtgatcaccccggcattctggatagacacatcgacggtgccaaatttttccagcgcctgctgatagagctgttgcacctgctgttcgttggtgacgtcaatctgtaagggaagaatatcgacgccatactgctgacgcagcgtctcggcggtttcaaacacccgttccgcgttcgacaccatcaccagattggctccatcacgggcaaagcgttcggcaattccggccccaatgccgcggcatgcgccggttatcaccaccgtcttgccactaaagtctctgttcatcttcgcgtttccttattgtgaatgcttagcggactgctccagcatgctggccactgcggctttccagccctgccagtgctgctgcaaaatgtgatgccgttcagcgttgggcttaaagacgtcatgctgtggcagcagtgcccttagcctgacgtcgtccagcccctcaagcgccctgcgggaaagaagacccgcgccgagcgcagagagttccggcgtattgctgcgcaacacctcacagcccaaaaggtcagcctgaaactgcatcagccagggattacgcgtcggcccccgtccacccgcagagaactaaggtggaagtcgggatgctggcgcatggcgtcgatgacgtcggcgacttgataggcgatggcctcgagtgaggcacggataagatgcgaacgccccacgcctcggctcagcccgcttatcacgccccgcgcctgtccgtcccaccagggagcccccgcgccggtcagtgcaggaacaaaatagacgcccagtgtggattcgacgctggccggtagctcggtcaacgcccggctcagggtttcgcccttaccgtcggtcaggccggtgatttgcgccatccacgccaccgcatcaccggtgtgcgggatattgccctccagcccataaacggctctttggccatcgtgccaggccacggtggtcgcgagctgcgtgatgctgctctgcggctgcggaataggcgccatgaccgaagatcccgtaccgtaggtggccttcacgccgccgaactcgccgagcccgtggccatagagtgcagcgtgagagtcgccgaccatcgcaagaatcggcagtccgtcgggatcccgtctagaccgcgcgtctcgccgaagaaaccgctggagggacaaatctgcggcaacgcctcgcgcggaacaccaaacagcttcagcatctgcggatcccagtcaccgtgctggagatttaacagctgggtgcgggcggcatttgaggtgtcgcagcgaaacgcctcgccgccggtcagattccacagcagccaggcatctatcgtaccgaggcaaatctcgccggaggccgcgcgcgctgcgccgtccggcaggctgtcgagcagccatcgcatcttggaggcggaaaacagggggcaaccggcaggccggtaatctcacgaatgaccggttcctgatggtcacggcgcagttgctcgcaaaacgccgcgctgcgcgaacattgccaggtcagtgccggcgcgaccggtttgccgctggcgcgataccagccgatggccgtctcgcgctgattgcttatcgccagtgccgcaatacgctgcatgcccacgctgtcgatgacttcgcgcagcacggtgagtgaagcttcgaccaatacctcgccatcttgttcgacccatcccgcctgcggcgtttgtacctgcaagggccgcgaagactgggcgaccactcgccctccgccgtcgatagcgaccgccttggcattgcttgtgccttcatcgatcgccacaatgacgtccctgtgtcgggtctttacctcaaccatggctcacctcagacagcggagacgttgcctgctgctttttttcgtgacggcgcatcagcgtgaccttactttgcagacgctgctggaactggtcgataaccacagcggtcacgataaccagacctttaatcaccatctgccagaactcgctgacgccaagcatcaccaacccatcggccaggaacacgataacaaaggcaccgataattgaaccaaacactcggccacggccaccggccagcgcggttccgccgagtaccgtggccccgatggcgtccatctcgaacatattgccggtcatcgggtgcgcggtttgcagctgcgatgccaccaccagcccgaccagcgccgcacagaacccggaaaaggcatagacaaagattttgaccttggctatcggcacgcccgccagcctggcagccgattcgttgccgccgatggcatagatataacgaccgagcggcgtcttcttggtgatataaataccgagcagtaccacagcgaccatcagccagataggattatagataccgagaaaggtgcctgaaccgagcgtcgcaaaaccggtgttacccaaagcttcgaccccgttcagattgggaaaggttttgccgtcggtagtcagcagtgccgcaccgcgcgccacgtacatcatccccagggtgcagatgaagggcgcgacgccaagcttggtgatcaccagcccgttaagcattcctatcactactccggcgacagcgaccacgacactgacctcaatcacgttaagaaacagcaggttgtcgccccaaagtgggatgccaaacgacagcaacgccccgccaatcatgccgcaaatacccgccacggcccccaccgagaggtcgatccctccggttaagatgaccagcgtcataccgaccgccagcaggccggtgatagcgacgtgctgggtcatgatcagcaggttggacggcgtaataaagttgggcaccatcgcgctaaagaaagcgaccacaatcaataacgcgataaaggtgcgcgccttgagtaagtacatgtaaatgagatacttttgactttgcatagccgttccttaatcttaatcgtgtggtgtcgacgcgcggatcagctttcctctgtccacgtcggcacgccgcaggtcggcagtaattttgccgtccgccatgacaattacccggtccgccaactgcatcacttcatccagttctgatgacgagaacattaccgccagtccctgctgcgccatcgcgccaatcagatgataaacgtcggttttcgcgccgacgtcgatgccgcgcgttggctcgtcgagaaacaccacctgcggatgggtcatgagtgccttggcgatcaccaccttttgctggttaccgccgctcatcgaggtaaccggcagacaggcgtcactcaccttgatggacagcttggcaatcatctcttttaccgccgcgtcttcgggcacatcgcggatcggtaacagcatttttaggaaacttttgctgcacaggctggaaagcgtcatgttgatttttatcgacagcagctgaataagcccttccgcctgacggtcttcgggtaccagcgccatgccgtgcttgagccgataggcaaacgggctgtgctccatgcgtttccccttcagccagatctcgcccgcgtcctgtttcagcaggccaatcagggtcttaaacagctcggtccgcccggcccctaaaagtccgtaaacacccaccacctcgccctgatgcagcgtcaggctaacgtcattgagtgaataaccgccgttttgatgcagcagcgtcagaccgttggcctgcaacaccgcgctacctttttcggcgcagcgatagtcaaactgcttttctttttcaccgaccatgctggaaattatccagggaatactgacctgactgacctcctgctcggcgacaaacttgccgtcgcggaagacggtaatgtggtcaccaatttccatcagctcttccagccggtgcgagatatagatgatggtgacaccgcgtcgcttgagctgctcaataacgttgaatagaaccttgacctcggactgactcagcgccgaagtgggttcgtccatgatcaacacccgcgtatccttcgacagcgcgcgggctatctccaccagctgctgatggccgattgccagctcttccagcggcgtcagcggatcaacgtccaactccaggcgctccagcaaggacttcgccagctggtactgataatcgacgttgattctgccgcgctggaaaaattcgttaccgataaaaatgttgtccatcaccgtcatattcggaaacagattcagttcctgaaaaatgatgctgatcccgtgcttttccgcctgatgggtcgagctgagcgacaccggttcaccgtcgagcaggatttcgccgctggacggtacttcaacgccggccagcatcttcatcatcgtcgatttaccggcaccgttttccccgataagcacgttgaccttgttgcgatagacgcggtaattgacgttatcgagcgccgttacgccgggatagacgcgcgaaacgccctgggtttcgataatcaccggtccccctgaagcagagggttggcgaaaggctccggctgtgcgctgctactgcgttgttcaaacatcgcgactccttactgcgtggccttgtcagccgtgattttcgcaggtgtcagcagaatgggtggctgcggggtatcaaaggcgctaaatacgccatatatcgtcagtttatcgccgaccttaaacgacggtttgccgagcgaggcaatggcccgctgattgatggctttaccgaaatcaccgaacatattctgatcgttgaagtcgctgtagctcaggccacgataactgtcgcgcagctcggtaccgcgaaacgttgggccaatctgcactttcacttcccctactttcgggtcatcgctcttcagcacaatctggccgttgcgtgattcagtattgacctcactgacggtgccactcacggtggtgttgaatacgcagggattctcgtcctgactgcgataaccaagctgctggcaagcggtatcaaagtctttcgccccctctatctggccgagtaaagtagcaagcggcttggcagagctgactatctgcggggcaatttgttggtcaaacagcatcgccgcctgtgccaggtgagggttcgggggattcttcagttccgccagctttttttcggaaactattcggcaactgcaaagcagcagcgttgccatgagtatccacatcaagcgactagacattacgcttctcctttaagccccgcccaggcggggcctgtatctgctctatgcgcgccaatctttacttctgataattgaagttgttgaccttgtcggcgttgtctttcttgatgagaatgccgcggaacagaatacgttctttaccgctgtagctgcctttctggatatattggtcaagaatttccacgccctgagaggcaatcgcctgcgcctgaagcatcacggtggcgtacagtgcacccgatttcaccgcgtcgcgctcgtcgttgctgccgtcaatgccgacgacggtaacatcgctacggttcgccgccttgagggccgcaataacacccagcgctaccggaccgttgccggttatcacgcctttgatgtctggatgcgcctgcaggatgctgtccataatgcgcttaccgtcaatcagcgtgcctttggcgtcctgacgggcgatcattttcatatcagggtattgatcgataacgttgtggaacgacttggaacgggtcacgcagttgttgtccgcaagattacaggtcagttcggcataggtgcctttctcacccattttttcaacaaattcattggcgacgtcagagccagcctggaagttgttgtgggaaatttgcgccaacgccacgccgtcgaccgggatctcacggttgataagcaccaccggcacaccggcatctctggcctgcttcacggcggcaacgcttgcctgagagtcggcgttgtccagaataatgccctgaaccttgcgaccaataaccaggcttatcagctcaccctgccgtttaacgtcctcgccgtgcgaaagcaccagcgttttgtatcccaacgattcggccttggcttcggcgcctttcgcctcggcggagtaatacgggttatccagagagttaaccaggatagcgagggtgcctttttctacggcgaaggcgggaggaacgacgagactggcaagaacggttaacagggcaaggtgttttttcatggtgaagttctctcaatgttattgttttttatagagcttttgggcgtttattttgtagggttaacgccgttttttagagtcttactgcaagccgggcttaccagatggtgaaaccaccgtcgatcatcaggtccgcgccggtaatcatgtcgctgccgttgctcgagaaaaacagaatagcggcggcgatttcgtcggtataagcgaagcgtccaaggggatgagttttttcatctcttcgcctttttccccgcgccaggccttctcgcccatcggcgtcagcaccacggttggggagagcgtattcacattaatacggtgcggtgcccactctttggccatgaccttggtcataccgagtaacccggccttggcagaggtgtaggcgcagtggttatcgatagcaatcgaggccgcctgcgaggcgatgttaatgattttcccacctctaccgcgtgctatcatgctgcgcgccgccgcctgtgagcagaggaacggtccggtcaggttaacggccagatttttctgccactgttcaaaggaggtttctaccgccggttcgagatgtacgtagcctgcgcagttgaccaaaatatcaatctgcccacactgctgttcgacctggcggaacacgtcgacgacctgagagggacaagtgacgtcacactcgaaatagctaacctgacgttctcccagctcatccactatctgctgtttcagagcgctttcgaattgtggatagagcagcgccagatgcgcgcccttctccagcatcatacggttgcttgccatcgcgataccgccgaatccccccgtgaccaccacgacttttccctctagcgacaggtgggtgtccacgccgtagcgcaggttgacgtcgtattgattagtgctcattcgcagcctccgtgcagcggcaatcgctggccccttcagtgcggcaaccagaccggatgtatcgatagaaaattgacggcgcagtgcggtacgactgctgctgtgggtgaactcgtaggccggaatgccgaacgcttgcagcggctgactcaaacggtatttaaggattaactcaccgatgatggtgcccagaccaccgctcaatgcgtgttcttccatggtgatcacctttttatgcgatttaatcagctcgaccaccgccagctcgtcgagcggccacagcgacggcagcgacaccaccgtcggattgcagccctgttcgcgtgcggcaagtgcctcatgcgccagcgtgccaagcgtgaacaccaccacgtcgtcgccctcggcgagtacgtccggctgacccggaataaagcgataatcctcgtcgtgcaacaccggaagcttgtcgctgtccatgcgaatgtagaccgggcctttatgtttgatggcatggcgaacaatggcctgcgcctgactggcgtccgcggggcgaagacctgcagattgcccaaggtacgggcgatggcgatatcgttggtacagtggtgcgttgcacccagtgggccataggcaaacccggcattgaggccaagcattttcacgttggtttctgaataacagacgtcgtttttcatttgctcattcgaacgggcaaacaggaaaggtgcggcgttagcggtaaacaccacgtggccgctcagtgcgacacccgcggccatgccgaccatgttctgctcggctatgccgacgtttatcacccggtccggataagccttttcgaacggcgaaatttttgaagttgaggtcgagtcggccaccatcacgctaaggttggcgccctgctcctgttgttctatcagcgtcaaaacgacggcgtcgcgcaagtcttgcatgatcactcctccagctctgccaacccttcggccagctgttgatcgttaggcacggcgtggtgccagcgggtacgttggccataaacgaaatgccgtggcctttctcggtattggccaaaatgacgcgggtttgccctgcatcggctgggtgacggcggcatgaatagacgccgggtcatgcccgtcacactcgagcacctcaaaaccgaaggcgcgccacttatcggccagcggctccagtggcatgatgtcctcggttttgcccgcgagctgcaggcgattgcggtcgacaatggcaataagattgtcgagcttaaacttgctggcagacatcgcggcctcccagttggagccttcggcgagttcaccgtcgcctagcaacacgtacgcacggcgatatgcgcgaccgctgattttattgccgagcgccagcccaacggcaatcggcaggccatggccaagaccgccagaattaatctcgaccaggtccggaagcttttggtgcaccggatgacccgccagcagcgtatcgtccccataaactggtcgagcacgttcgggtctaacagtcccatcgccgccgcactgcaatacaggccgcctgcgccgtgacctttggaaagaatgaagcgatccctgtcgggactcgcctgtgcgcggtccatcactgccatgtagagggtgcagatgatatcgatttcagaaagatcggccccggtgtggcctttgcctgcgtggtgattcatttgcaaaacgtaacggcgtgcctgccgggcgacagtttttatttcctgaaacgttttcatttcctgagcgtccatctttacctcgtcttgaccttgccgttcactttctactgccccatgaacagtgtcgctaacggcgcaactcattttcgaataaaactataaattatcgttttagggaaaaatgcgcggttgatcaagtttcatacaaaaacaggttttttattaaaatccttaaatattagaaatatacataaataagacttgttcttaaaaatgataacactatgtaatacgaggaataatgaccaaaaacactgatttgattttcatatgaaaatcaaaaaaggtttttttgctcctcgctttagatctgctgcaacgttactattttcatcatgtcgcgataatttggctttaaagcaggttttaacggccctatgccgctaaaatggtgccagtgaacggataaggagtatttcaattgaaaagcaaaagcgaacaattggcggatatgcagcatcgtcgcgacaagatattagaaatgatcagggaagatggcaccgtcacagtgaaaatgctcactgacgcctttaacttgaccgaggcgactatccgaaccgatctgcgggtgctgcagaaacagggatttattcagcgttatcacggtggtgcgacgctaatggacggcaaacaaaatactcacgccctgctgctcgagcgtcagacacagatgcgggaaaaagacgccatcggacagctggcggccagttttatcgagtcaggtgacaccattattctcgattccggtaccaccaccacgtcgattgccaaccatcttgggcatattaaacgtctgtcggtcattactaccggggtgaatatcgccctacagctcggcggtgagcccggcgttaacattttgctgaccggcggtactttcaagtttccgactctttcgacctcgggagaaaaagcggccagtttttttgagaacgtattggccgagaagctgtttctggcaacggcctgtatctcaccgcgcgcgggcctcagcttccctagcgagacggatatcaaagtaaaaagcgcgatgattcagtcggccaacgtggtttacgtggtcgctgattcaagcaagattgataaagtgtcgatgtttgcgctgccgtgcgagtggtcgaagattcattatctgataaccgacagcgggattagcgccgaatccaaggctgcatttgaggcagtcggcgtaaaggtgctggtggcttgactaagcggtggggagtttgggtggctacccaatgcgcttgagggagtttattgcaaagtcttttaaggtctctaagatcaaaagcatgcgcttcgcttactgggcggcgcatacatttgacctaaaagactttgacctttaagactcgaaaccaaaaattttgacctaaagatccaattcttgaacccatggaacgatcggtcaatcctccccctatttaggccaatttggccaaatcttgcgatcctcattgcggttgccatacagtttatcaacgtcaccgcatgacagaccaatatctttcaactggcagctgctgagtccacgcagtatcttcatcgtatgacggcgctcacgccagtttgcataggatctgacaaacgtctcccaccaaccgagctttaattcaccgttatcaagatatttatcactcaactgcgcgctaacgtcatgcttagacgcgtcggctgccgtttgctgaatagcactcgcgttggtggtaaattgatcgctatcactgattcttttcatatttgccctcctgttaacccttacacacagaatgtattaacggcagaaaacaatacagattcagtttttaattattttcagcatacagttctcgccttaaagacagatttgggcgtaaattatgcctatctgtactgctatcgggtgacaatatgaatcgctatgagcatttagccaacgttttgggtgagcgtatcgaacagggactctatccttcgggccagcgtctgccttcggtccgcatgttaagcaacgagcacggcgtcagcgtcagcaccgtgcaacaggcctatcggatgcttgaggaccggcttctggttgaggcgcgcccaaagtccggctactttgtctcggccagtaaacgcctgccggggctgccggccgtatgccgcacgccgcaacgccccgtcgatatctctcagtgggatcaggtgctggcccaaattaccagccgcgttatccccggtatgatagcgcttggcggcggcactcctgacctgaccctacccagcctaaggcccctcagccgtgccttggtcaaggtcgcacaacgcactgacctgagcgcgctttattatgatttaatcgacggttcgaaagagctacgcgatcagattgcacgcttgatgatcgacagcggcagcagtatcgacgccgagaatctggtgattaccaccggctgtcacgaggcgctgtcgattgccattcgttccgtttgtgagtttggcgacatcgtggcggtagattccccgagcttccacggcgcgatgcagaccctgaaaggttttggcatgaaggcgctggagatcccgaccgatccggtcacgggtatcagcattgaggcgctggaaatggcgctcgaacagtggcccatcaaggccatccagctcacgccaaactgcaataatccattgggttacaacatgcccgatgagcgcaaaaaggcgctgctgcggctcgcacagtgttatgacatcgccattattgaagacgacgtttatggcgatctggcctatcagtatccgcgccccgcgacaatctactcgttcgacgatgacggccgcgtcctgctgtgcagctcattttctaaaactttggcccccggtctgcgcatgggctggattgccccaggccgttaccgcgatcgcgcactgcacatgaaatacatcggtaccggcgcaagcgccacccatccgcagctggccattgccgattttatcaaggaagggtattaccaaactcatttgcgccgtattcgccaacagtatcagcaaaacctctgtgtcatgaccgactgggtgattcgttatttcccagaaggcgtgcgcgtcagccgtccgcagggcggatttttactgtgggtcgaactggatgagaagattgatacacagaagcttaaccgcctgttggaacctgagaagattcaaatttccgtcggatcgatattttctgcctcagggaaataccgtaactgcctgcggctaaactattctcagctcgatgagaagatccacgaaccggctatcaaacgcgtcggcgaggtgattcatcaaatgatggaaaacggttagcacactttcgcgctgctccactctgagtaagaactgagtaaaacctgattttagcattgaacgctgaatcagtttttactcaccgctattgccggggatcacctgaatgtcttccgcgcctagcaccctgccatccttcgcgtgcaaccttatcggctcgataggctgcaaattcaacctgtctaccgcacggctacaggcctcgtcttcagcaaacagatactgatttccccactgtcccaacgctatcaggatcggatacagctccttacctttttgcgttaaaacatactcctggtaggcggagccgtcagacgccggtccaatctcgagaatgccctccgcaaccagcgttttcagccgcgaactgaggatatttttagccgccccagactacgctgaaactcactgaagcgtttaatgcccccagcgcatctcgcacgataagcagagtccaccagtcgcctatcaggtcaagcgaacgcgcgatcgggcacacactgtcgttaaaactggtgcgtttcatttatcactccgtgctgcgaaacctaatctggttgcattataaaacctccggtgctaaaaatcatctggtttaataatgaaaccccatgattcattcaacctggcaatgacgagaacagaggaaacacaccatgactcagacaacacagtctaaacctttagcgcttatcactggcgcatccaccggtattggcgcaacctatgccgatcgactggctcatcgcgggtatgatcttattctggtcgcccgcgacgccgccaaaatggaaaacctggccgcccagctcagcggcaaaaccggcgtcaacgtgcgcgttttccccgccgatcttacccgtgccaccagcctggcaagcgttgaacagcttatccgcgataccccggctatctcactgcttgtaaataacgcgggatcggtcctgccgggtaaatttaccgatgccgatgctgacgccatcgatgagcttatccgtttgaacgtgacctcactggcacgcctttcccgcgtggcgctcgacggactacagactcacaaaaacggcgcgattatcaatattgcctctgtgctggcgctggcgcctgaaatcagcggcccggtgtatgcggcgagcaaagcgttcgttctcaccttcacccagtcgcttcaggttgagcttgccgatcgcggggtctatttccaggccgtgctacccgcggcaacgcgcaccgatatctgggagaaaggcggcaaaaatattgatgaagttccgggcgtgatggaggttggagaactggtcgatgcggcattggcaggctttgaccagaaagaagccgtcaccatccctccgctgcaggatgataataaatggctggcactggacggtgcacgcaaggcattactgccggagtttttacagagtcatgcggccccgcgttatcgttaatccttgattaatgagtccttacaactgccctcgttgcaagcggcggagacactggttacattggataaacttattactacagttttttaacatctacttttatcctccctgttatgaccgctggtcaaaacactaaaccatggcagagtgaaaatgactgaatttgttatccccgtaccggaagccgcttcactggcaatagaaggacaagatgctcgtttcccattacgtcgcgtttactgcgtaggccgcaattactcggagcacgcgcgtgaaatgggtcacgatccggaccgcgaaccgccgttctttttctcgaaaccggccgatgccgtcgtgcccgctcagggtgaagtaccctatcctcctttgacctcagacctgcaccatgaagttgaactggtcgttgcactgagtaaaggcgggaagaatatttcacctgaagaggcgctgagccacgtttggggttatacggtgggggtagatttgacgcgtcgtgacctgcaggctacggccaagaaaatgggtcgtccatgggatttcgccaaaggttttgatcattcggctccggcaaatgcgctgctgcctgtcagtaaaattggccatccggccagcggaaaaatctggctggcggtgaatggcgagacgcgtcagacaggtgacttgggcgaccaaatctggcaggttgccgacgttatcagctatttgtcgcagtcggtagagctccagccgggcgacgtgatttttaccggtacgccatcgggtgtcggtgctgtccagccgggcgatgtggtctcggggggcattgaaggcatcggtgagttcagcttcacgctgagcgccaagccataaaaaaacggcctcctgcacgcaggggccgtttttcttcatacagaatcgtcgattacttcgcttcaaacgtctctgcgtgttctttctcaagctctttcacttccgctgcgcgtttacgcagaccgaaccaacccagtaccagcagaatcaccagtgcaggaatagtcgccacggtataagtcccgttcggatagtcgaaggccatcagcaccagcacgctgaacaggaacaggagcgtcagccatgaggtgaacggtgcacctggcatcttgaacgaaacgtccttcgccttgccttctctgatagccttacgcagtttcatctgacaaaccacgatgaaaccccatgagctcagaatacccagagatgcgatgttcagaacgatttcaaacacctgtgagggcacgtagtagttcagcaccacacccacgatgtatattgcaacagtgaccagaataccggcgtaaggaacctgttgcttgctcatttttgacatgaacttaggcgcagaaccgcccatcgacagcgaacggagaatacgcccggtcgagtacaggcctgaattcaggctcgacagtgccgcagacagcaccacgatgttcatgatggtaccgatgtaagggacacccagtttgctgaagaaggtcacgaacgggctctgaccggcctgataggcgttccatggcaacaacagcaccagcagcaccacagaaccgacgtagaacagtgcaatacgccagataacgctgttgatagccttaggcaggattttctcaggctctttggtttcgcccgcagcagtaccgaccaattcgatagccgcaaaggcaaagactacccctggactagcaccaacgctggcagcagcccgtgtggaaagataccgccgttgtcggtaatcagatgtaagccggtaggttgacccgccagctctttgccgctgccgaggaagaccaccccaccatcaggaagatagcgatggctgccactttaatcagcgcaaaccagaactccatttcggcaaaccacttcacgccaatcatgttcatggtggcgacgatggccagtgcaccgagcgcaaacatccactgtggaacgtcgctgaaggtgccccagtagtgcatatatagcgcaaccgccgtgatatccacgataccggtcatcgcccagttgaggaaatacatccagcccgccacgtaagaggctttttcgccaaggaattcacgggcgtaggaaacaaagctgccgctggttggacggtgcaggaccagttcgcccaatgcgcgcagaatgaagaatgagaagataccgcaaaccagatagaccagcgccagcgccggacccgccatttgcagacgcgcaccggcgcctaaaaacagaccggtaccgatagagccaccgatagcaatcatctgcacctgacgattgcccatactcttgtgataaccatcctcatgagaatccagccaacgccttttggctgcgtgttgttcttccgcagtttttttatgtcgtttcatttcttacctgttctccaaaagaattctttcacgctcggccttcaacatgagcaaacgattgcaattgctgacgcctgtcgtggcttatcgccactgtattattcttgaccaaccgaggttaacgaggggttaaattcggcgacggcggaagatgctaccctattctcttggattgaggcaaaaaaaacctcattttaaatcgttataaatgcgcttatcagtacgatattttgccatatagtcgatatattgaccgaaacatccccaacactcttggggatgctcgtgatcaatctcaaatttcaggcaaaaagcttgagcttgccgaccacttttcgtaccgattttttctctccggcgagggcaattcccagcagttgaagactcccttctgtctgcaaagcgaccgcctcaaggaaggcctcgtagtgcgtagtttgttgaccttcaaggggaaaaacggttatatcgcagccacgcgacgtgccattgactaacaccgatttgagatcttcgtcacttccgctcagcacactgatgcccaacggcgtgagtccgggataggtttttccgtctgcaatttcgagaggtgaaccgattaattcaggatgacgctggcctagcgtcattgctagcaccgccgccgcattagcggcttttcctgccggaagactttcattcaggacaatcaccagacgttcaggctgagtcggttcacttagcggggaagtcgtgatagatgagactgacattacggttttactccatttaacgaataaaaaccgattgtcagtgatagcgtatcgctagtctggaagatttgtgcagatttgccgatattgcgccggagacaggcgataggcgcggcggaaccagcgccccagatggctctggtcagcaaaaccaagctctgcggcaacctggacaggtttttcgccctgcgacagtctgatgcgcgcctcggccagtctcaactgcaccagataagcatgcggcgctataccaaacgcctgcttaaaggcgcgcgtcagcgtgaatcgatcagtgcctgttgcagcggccagctcctgcagcgacaggtcctcattcaaatgcgcatgcatatattcacgggcctgatgagcgcagcccaaagcaaggtgcgccgctgacgcctcggcacgccaatggatatgcggagccaaatgcgctaacagattatcgagcgcactttgttgcacaattctgaattcgccaaaatgcagcagttgaaaagtctgtgcgatggcctgcgccagtcgggggtcgctgtttaatgttttcgcaaatgaaagttcatagctgctcggcgtgtcatgaaacaggtgacgaatttcacggtcgagccattcgggctgagataaaaggtctggtaagtgaatccgccctctattggagcgtcaccgtcatgtatctcgccaggttcgagcaaaaagatgtcaccgggcgtgctggtgattttattacgtcggcagtgaaactgctgtgtgccctgctgcgtgacgccaaccagataactgtcatgccagtgtgcgtcgtaggcgtgcccctcaaaatgcgcatgaatagtttcaatctggtactcgggcgaatgacgcacgtctatccagtcgttgttcatttatgttccttctcgaggcgcatgatattgttgagccgctgcaccggcaataacgcctgcagtttgtctcgactgacttcctggggcgaatagaccgtgagtctgcgagcggacccgtcggacaggagaaaactgtggtattcaaacgacatcgcatcggcaatggggtgatgaatacgcttgatgttggtcagctgtgacaatacctcttgccgcgcccacagctgcctaaaggtctcgcttttcacattcaatctgtcgataagcgtcgcaaaatgggcctcgttgacgcagtgtgccgtttcggcacgaaaaattgccagcgcggcggggctatctcagcccagtccaccaataactcccggtgtgcctgattggcaaacagcatcgacagcagatttcggtcatcgccctcaagccgggaataatcgccaaaaactgcacaggccgcattattccagccgacaatatcccaacgtttattcgtaatgtacgcgggctgaaagctcagatcatcaagcatccgctggagcgctgcctcaagcggtggctcgttcacaggcaagcgctggggcatcatcctgccgctcaacgcaaacagatgggcacactcggtctccgtcatacgcagcgcatcggccagagtcaggagtacgcctgctgaagccttcacttcacgcccctgttcaagccaggtgtaccaggccgtgccaacttttgccaactgtgcaacctcttcacggcgcaagccaggcgtgcgccgtcgttccccaagggcaggccgacgtcctgcggcagcagcgattcgcggcgagcgcgaagaaaattgcccaactccctgaaatttcttgcgctcatgaccttctccttatgcagacaggtagtcgcgaataccatgataaaccgaagactgtttagggttctttaaacacgcaaggatagcgctgcgggcgccgattggataacgcctttcggcacgagtccttttactctcatcactatggataattttattatgacgacgcaacatgttttggttattggcggttcatcaggtattggtctggcaacggcaaatttactggcgatgcagggctaccgtgtcactatcgcagggcgcgatgccgaaaaactgtatcgggctcaacgcgatgcgccttacccgctggatacggttgttgtcgatgccacggctcattctcaactccctgacgtttttgccgacctagggccgctcgatcacttgattctggcgctgggcagcggtaagggcgtgggcgccttcgccagcctcagcgttgatgaagtgcgtcagggatttgaagaaaaggtttttccacatttcaactgtgcacaggcagcgctgcccactttaagcgccaccggcagtatcaccttcctaagcgccatcacggctctgacggcgatgccgggtaccagtgggataggtgcagccaatgcagcgattgccggatgggttccaacgctggcggccgaaatctgcccacgaagagtcaatgcggtgtctccgggagtgattgataccccctggtgggactttttggatgaccaccagaagagcggcctgtttgctgaatatgctcaaaagacccctgttcggagagtcggcagcgcgcaggacgtcgccgaagcgattgcttttttggtgagaaatacctttattaccgggcagaatatcgtgtgtgacggtgggttaagtctgggaggataggtccgaagtcgcggtatcagagaataaaacagcgcaaactgtctgagtttgcgctgtcttggcagcagccttaaggcttacttgtcttgcagggacttagtgcggttagcaaagcttttacgcagcttttgcagcttaggcgggataaccgccatgcagtaaccgttgcgctggcctgcaccatcccagtaatcctggtgatagttctctgctggataccaaggcgcgatcggctcgattacagtcaccaccggatcggtattgctttcctgcgcacgggcgatagccgcttcggcttcggctttctgctcgtcgttcagcgggaaaatagctgaacgatactgggtgccgatgtcgttaccctgacggttgagctgggtagggtcgtgagtcgcaaagctgatgtccagcaaatcgccgtatttcagctggtctgggttaaaaccgatgcggattgcttcagcatggccggtttcgccagtacatacttgttcgtaggtcgggttctccgtcgtgccgccaatatagccgctttcaacggtctcaacgccgatcacatctttaaacacagcttccgtacaccagaaacagccgcccgctacgattgcgtattcaatagtcattgtcttttcctcttcttaaacaccgtggtgttagcaccttgcccacaggctacacttttaaagcaatttgaaccagtgggcagatgatctccctgtgctgttatgagaaacactgctgctttatcgtgcgagacggcgaaagtttagatttttcggctcataattcgcacgatcaggcttcccgcaccggcgagggtcgcaagcgcgataacgccctgccatccccctagctccagggctttgctaccgagtgccgatccgacggccatgccgatgaacaccaccgtaaacagcagtgcattcaggcgtccacgggccgcaggatccaggccatataccaaggactgatgtgacaccagcgtagcctgcacgcccaaatcaaatccaattgcgctcagaacaatcagcgctatctgcgcatgcggcgacagcaacggcagcaggaacatggcggcaaatgacaccatcaccagcgccgaacctatctgcgtcaccagggcaggcccttgcttgtcagccagtttacccgccaagggtgcggcaagtgcgcctgcggcacccgcgaggccaaacgcccctgccacgccgctgcccaaatggtaggtctcgttcagcataatcgccagcgttgaccagaaagcgctgaaggccaccgacagtaggccctgcgacagcgcagcgcggcgtagcgttttgtagtgcagccagaggtgacgcatggagagcagcagctgcggataactcagctcagtgccgggcgtaaatcgtggcaacacccgccacagcgccagtcccaccagcgccacgctcaccgccgccaactgatacatcgcacgccagccgaagtactcggccacgacgccgctgaccacgcgagaaagcaggatcccgaccagcagaccggtcattacggtgcccaccgtcttaccccgctgtgccgccggggaaagcgccgccgaggcgggaacgatatcctgcgccagggtcgccgttgcaccgattaacagactggtgaggagcacgccgtgaattccgggcgcgaaaccacacagcagcagtgacaacgtcagtaacacacttttcagcaagataatcgtgcggcggtcaaaacggtcacccaacgggataagaaacaaaattcctaacgcataaccaatttgagtgagcgtgggaataagccccgtttgcgtgaggtttgcgccaagagaaggcccgataataccgagcataggctgactgtaataaatagaggcaacgctcagcccggtgcctgcggcgagcgtaaacaccattttaccgggaagcgcgggctcttccacgggtgcaatattctgtgttgtttctaattctgacatagtggtatccccggtgactttctttttgccgaaaggttaagtatcgctgactggcgatactgtgcgtggtcgctctggctgctatccgatgtgtgcatttttatgtatgtcaccaataagtggtagtcatctaaaaggtaaaactgttatacataatacgtatgagcaaaacttcctcaggcggtatcgaccgcatagacctgatgcgtacctttatacgtatcgtggaaagcggcagcctctcggcggctgcacaacaaatgcaaaccagccaacccaccgtcagcaggcggttgcaggcgctggagcgtatgcttggggcaaaactgatactgcgcaccacgcatgcgatgaaattgaccgatgacggacaacgctgttatcgccatgccaagttgctcattgagcagtggagtgcactcgaggacgacctccgaggcgatggcgaagaaccagagggcattttgcgcgtccgtgcaccgcacgccttcggacaagaccagctgatcgccccgttgactgaatatctgcagcgctacggcaatatgtcagttgactggatgctgaatgaccgtacccctgactttatcgccgaacacatcgactgcatgattcaagttggggagatatccgatccctcgatggtcgcggtcttgctcgccgaggtgccgagaatcgtcgttgcctcaccgtcgcttctcgcgggttactctcctatcaagcaaatagacagtcttgcccgattgccctggatagcggtaagtaccttttaccgtaacgaagtgacgttaagtcatggggaaagtgggagaagcgccagctttgagattaaacccaaattaagcaccgacagtttgtatgccgcgcgtaaggcggcagaaaccgggctgggggcagcaatagtatccgcttgggttgtgagcgaaaatatcgttgacggaaccctggtacatattttgcccgattggcacgctaaacccttacccgtgtacctggtttatccttacgccagctattatcccgctcgacttctaaagtttctggaattaattcgcacagtaatgccagaactcagtggcacacgaaggccgcgaaattaaccaccgaaatattattttaacaatccgagcatataacgataggtggggaataatgcctctatttacgcctcgtcacatatcttaacgttttcaagttttgactcgccaaagaaaacgctttttgtattttatccctactatttcccaaggaggcgaaaaggtatcaggcttaaacaaagtcaaattgcgtataaattaaaagcagctgttcaaaaagagtaacgtcagaattaatttttgaccgattgtctataaatttggcggtaaaaacagaccttatagttacttcaggtaattattgtgccccaccaagccgcgcaggcccctcttctaccataagaaactgttatagaacggcaagttttatacaaacttttgacaagattattaaaaaaacctctgtcaggaactcactaaggtgttgcgaatctggaacaatcgtattatatatacttatcgttgtttcaaacgcagagcgtcaaaaaaatgcaagtaaaaaaccttgaaaaatatgacgtttcgccaaaatttgctctggccgctcttgtttcaaattgctatgatgctagcataggattaatcctagatgcgtttttttaaacaatgcaaaaaaagcaacaggatataattgccccttgttaaccgccagatacgctataacagctcggatcttgcctcaccggacctgatgaaaacgtaacgagccttaatcttttgggaggctgtaagccaaataacaatgcgactctgacccaaacctgcgctaaagcgatttttataatgctctttatttaaatcattgatgcggataaaacgggaaaagcgcataaaaaaatcagtcttaatctctactttattttgtaatgttggctctgaagataataggcattatctgaaaaacaggttctccagaagatagtttgaatggttttgttaaccttgttttgctcaagcgaatttgtccacgaagttcatttcagcagagaaagtgagaaaaactgacaactaaaccctgtgagtcaagccttcgcgacagtttaggtcaacaggattgtgcgtagcccatggatgtaaaaacatcaagtgcaaggcggaataataatataaacgacagcgcagagcctcctaagctgtcgaaataatttagcgaagctaatttatttggagggcaagggctgttattgtctgtactctgaagtgcggaccaagattatatgcttatttttttagtgtattggtagctacgagccaagggcggtagcgtactctttcccggttaacacttgaacacttcagaagtaatgcgagatttcacacaccttttccggcaagcaggatgcattccccgcctgggtctgttatctctttaacgtcgaagatgatgatgatgataaagacagtaactcttaaaaaacgagatggtctggaacctatgcacaaaaatctgtttaaactttctgcgctattctttgctgtgggtattttgggcggctgtacagttataccagggcaaggcttaattaccgggagtaaaaatgtcgtcgaggtcccagacagcgattacgacctggacaagctggtcaacatctatccaatgacccctatctggtcaataagatgcagccccctgccgcaattgcacgtcctaatccacaattaacaactcttttaaaaagttatcagtaccacatcgggatcggtgacgtgttgatgataactatttatgatcacccagaattaaccacgccagcaggccaataccgtagcgccagtgacacgggtaactgggtcggtgcagacggtaatattttctatccttatattggccaggttcacgttgcaggtctcacgcttgatcaagttcgtaccatgattgctaaacgtctgtctgctttcgtagaaagcccacaggttgacgttagcgtagcctcgttccgctcacagagagcctatataacaggtgaagtgacaacgtcaggtcagcagtcaattaccaatattccgttgaccgttgtcgatgctatcaacgccgccggcggtttgaccgccaatgccgactggcgcaatgtggtgctgactcataacggccacgatgaacgtatttccctccaggcgctgatgcaaaacggtgacatgactcaaaaccgtctgctctaccctggcgatattctttacgtgccacgcaatgacgatcttaaagtcttcgtcatgggtgaagttggccagcaaagcacgcttaaaatggaccgcagtggtatgaccctggccgaggccttgggtaatgctaacggtattgctcaggatatggctgatgcttccggtgtctttgtcatccgtggtattcacaacggaacaggtcaagataaaggaaaaattgccgacatctatcagctgaatgcaaaagatgcgtcggcgatggttcttagcagcaacttccagttacagccttacgacattgtttatgtcactgcagcgcctatcgtgcgctggaaccgcgttatcagccagatcgtaccaacgatcaccggcgttaataacctgactgaaacagtaaaatatatccgtgactggaattaagactgagtccccacgcgtcaatatgtcagcgatgacgtaattattgcgtgggggcaattattcatctctggctaaaccaggaaaagatgatgaaatatttcttggctatacccacttacaacggtggaaaaatatgggaagattcgatagctaacattaagaagtatgcacctgaagatctttatgttcaggttatcgattctggcagccgtgacggtacggctgctttagcggaacaggccgggttcaatgtcattgggataagttctcaagagtttaatcacggtgggacgcgaaatcttgcagtagactgcgccccgccgactgtgacatagtgatattcctaacgcaggatgcgataccggaagagggaagcctgcaaaaactggttgcagcctttgaagatcccaaagttgcctgtgcctatggacgccagttacctcatgttgacgcgaccctatctctcagcatgcacgcagttttaactataccgctcaaaactatgtttatactcaggcagacgcagcccgcgtcggcctgaaaacagttttcatttctaattcatttgctgcctatagaatatcaacatttaaagagttaggaggattcccctctaatactattctcagtgaagatatgtatttcgccgggaaggcggtattagcaggatataaagtggcctatgtggctgaagctcaggttcgtcactctcataattacacttctcttgaagaatttaagcgttactttgatattggtgttttccacggtaaagaacggtggattcatcaaaattttggcggtgcaggtggtgaaggtaaaaaatttattttttctgagctgcgctttttgctcaaacacggagttatgtatatcccacgtgcatgtataaataatgcaatgaaaatagccggatataagttggggaagaattacaaaaccctgccattcggatggaaccgcgcattgagtatgcacaaacgctattggaaataacaactcctccgttgcttctaccttatttgttgaggatacaatgaaaattatcgtaacaggtggtgccggctttattggttcggccgtcgttagacacattattcagcacaccaatgatgaagtgctggttatcgataaccttagttatgcgggtaatctggcttcactggctccagtaagcaatgattcgcgctatagctttgcccaggtagacatttgcgacgcagtagcgttgaaaaaagtattcattgaattcaaacctgacgcggtgatgcatctcgcggcagaaagccacgttgaccgttctattgatggtcctggcgcattcattcaaaccaacgtagtgggtacctataccctgcttgaagccgcgcgtgaatactggttatctcttactgaagaagccaaggccgccttccgcttccaccatatttccaccgacgaagtgtatggtgatttgcacggcgtggacgacctattcaccgaagaaacccctattccctagtagcccttattctgcgtccaaggccgccagtgaccatttggtgagagcatggaaacgcacctacggcctgcctaccctggtgacgaactgttctaacaactatggcccttatcatttccctgagaaactgattccgttgatcatcctgaatgccctggcgggtaaacctctgccggtctatggcaaaggcgatcagattcgtgactggttgtatgttgaagatcacgcccgtgcactgcacaaggttgtgactgaaggtgaagtcggcgaaacctacaatatcggtggccataatgagcgccagaatattgaggtagttaatactatttgcgatttacttgaagaactggtgccagagaaacctgaaggaattaaacactatcgtgatttgattacctgggttgccgaccgccctggacacgacaaacgttacgccatcgatgccggaaaaattgaccgtgaattaggttggaaaccggaagagaccttcgaaagtggtattcgtaagacagtgcaatggtatctgaataacttcgagtgggtaaatactattaaagcgggtacttggactgagcgtcttggtctttctaaataaattttaaggtgacagaatcatgaaaggtatcattctggctggcggctcaggaacgcgtttatatccccttacccgcggtgtatcgaagcagttgctccctatttatgataaaccgatgatctattatccgatctctgttttgatgttggctggtattaaagacattcttattattaccacacccgaagataatgatgcatttgttcgtcttttgggtgacggttcccaatttggtatttcactgcaatatgctattcagccaagcccggatggtttagcccaggcctttattatcggcgaggattttattgccggtgaaagctgtgcactggtccttggtgataacattttcttcggtgaaagcttcggtcgtaaacttgagcacgcggtgagcaatattgatggcgctaccgtctttggctatcaggtaatggatccagagcgttttggcgtcgtagagtttgacgaaaagaatcgcgctatttccattgaagaaaagccgactgagcctcgttcaaattgggcggtaaccggtctttatttctacgatcatcacgttgttgaaatggcaaagcaaatcaagccttcgcaccgaggtgagcttgaaatcaccacgctgaacgagatgtacctgaaagctggtaacctgaaagttgaacaattgggtcgcggttttgcctggttagatacaggaacacacgacagcctgctcgaagcttctcaatttattcataccattgagaaacgccagggctttaaagtggcctgtcttgaagagattgccttccgtaaaggctggatttcgcatgaacaagttgcacaacaggcgaaaattctagcaaaaaccggctatggaaaatatctgacccagctgattgaatttaaggacatctaacatggaaatcattgatactccgcttgtaggcgtcaaaattattcaacctaaggtgttcggcgacagtcgtggtttctttcttgagacatttgagaaaaaacgttaccagcaaatgttgaacatcgatctggagtttgttcaggacaaccattcacgttctagcaagggcgtcttgcgcggcatgcattttcagactgctaatcctcaaggcaaactggtgcgcgtagttcgtggtgaagtctatgacgtggccgtcgacattcgccctgagtctgcttcctacggcaagtggtacggcgtactgctttccgaagagaacaagacccaattttgggtaccaccgggtttggcacacggctttgtggtgctgtctgatgttgctgattttgaatataaatgcaccaattattatgcgccagagcttgaagcctgtctgatatggaacgatccggacgtcggcattgaatggccaatcgataacccactgctgtcagacaaagacaaacgcggcaaaacactgcgagaactggttaaatgaaaattttactgacgggtgccaacggacagttaggacgttgttttcaggacaggctcccggagggctggcaggtgcgcgctctgggatctgccgaactggatatcggcaacaaatctcaggttgaagaagccgtactttcatggaaacccgatgccatcgtcaacgcgggtgcctacaccgccgttgataaagcagagagtgaacctgaatccgctgctcgtgtaaacacgctgggtcctgaaaacctggctcacgccgcgcgtagcgtcggggctaaactgatccatgtctctaccgattatgtattcgacggtaagggcacccaaccttatcgtgaaacggatacaacgaatcctcttggcgtgtatggtaagaccaaacttgacggcgaaaacgctgttcaggccattttacctgaagcggcgattattcgtaccgcctgggtgttcagcgaatacggcagtaacttcgtgaaaacgatggtcaatcttgccgaaaaacgtgacgaactaggcattgtaagcgaccaacgtggctgtccgacctatgcaggcgacctggcaactgcaatcattgagcttcttcaaagcaacgcccaagggggcatttaccattttggcggcgatcgtgaagtttcgtggtttgaatttgcggataagatctttgatgttgccgtttctcaggggcgaatcgagaagaaaccgacgcttaacgcagtgacaactgatcaatacccaacgcctgctcgacgtccggcctattctgtccttgccggcgaaaagataaagtctttgggcgtacagctgtcaaattgggaagccgcgcttactgaaataattcgcaagttttgatttaaacaccaaagtcttaaagcttactcatttaaggttagcgatgggtaagcttaaaaagatcctgaacgctgagacgctatgagaaaaataaacgttatcctggctacgtataacggtgagaaatacgtaacagagcagattcagtccattttgttaaatttcgaacatttaccagagtacgactgccacattctggtttcggatgataattcttctgataatacctcggcgattatccaacgttttaaccagcaggatccacggatagagttactcgataacggtaaaaaaggtgggcctcgggaaaacttcaattatttgattgccaataccgacgcggactatacgttcttcagcgaccaggacgacctgtggctgccaaataaaatgcgcttgttcatcgatagatttatcgaacttgaacaacagcaaagcggcccgatactcctgcattcagacctttgcgtagctgacaaaaatctgtcacccgtgcatatttcaatgtttacgtatcagaatttgaatcgtaatcctgactttgccgcgctgatcgtcagtaactctgtcacaggctgcgtgatggcccttaaccgcgagcttctgattgagactcagaacagccgcatcagcgagtccatcatgcacgactggtatattgccctgctggcttcttctactggccgcattagtttcctggataattcgcttattctttaccgtcagcatggtaacaatcaggtaggtgctaaatcagcctcactgggtgacatgctgttcggcgcatcaatgaagaaaaaaatggagcaaacgcgtatctcggtgcagaaaacccgagctcaggcccagctttttctcgatgattatggtcaggtcctcaaatctgccgacaaagcactgctcactgcttatattgaatctttcgaaaaagggattttctctcgcttcaaattgtttagtagccacggtattcgtaaatcaggttcagtacgtaatgtatttttctttattttttatgtactgggtttgtaattctaccgtaggttatttcccaacgtgaaggtcataaataatcatgaagacgtttatcaatcctcttagggaaaaagtattaaacacgttagacttcaatatcagtatgcaggcagcaaaagtctacggttcccttctccataccatggatattggtcgatatgatgaccctgaaatggagaaggtactgataaatcgcgccaaggaatcattatccttatcctcggagtcagtccccaataaagattgtctacatatcattactgaagcttatattattggcggtcatacgcgattaatggaaaagctggccggaatgcatgagataccgccagatttactgattacgcgctacagtgatgaaaaagcactggagcgttgcaaaaagatatttactgccatccattcgatcgaagcaaacgaccttattgaaaccgtcaagcagattcattccttctgcaaggactataaacgtatcgtgttgcatatccatgctgacgatatcgcaacggtggtggcctgcggcttgatacagcaggttcgggagctcaatgtttactttgtaaaccatgccgaccacgctttcacctttggcagtgctgtagcgaattattatttccaactcagcagctacggtgctcgtctggacaagcttaagactatcgccgggcaaacctcatttttaggtattcccgtgtcagatattcgcccagaaaaggcgactacctcgagtgaagtcagcgctaacccaagtttctttagttcagggcagcgatgaaattcaagccctttcgcggagaaaatatcaatccgctaatagctaaaatattggataaatggccacaaaccaccttcacgattgttggcgtgtcgatgttaacaaacttttggtggtggcctctcaagctgcgttacggaaagcggctgaggctactgcgttacctgccgtacgatcagtttatctctctgacacgggaggctgatttctacgttgatagctaccctttcccgggaggaaccgcttttgccgaacagattcttgccggtaaacgagggattggactaatgtcacgggtacaaggttattcgccggccgataagcttaaaagaccaagcgtgggtgatgtgattgacacgattgaccactatcaagacgatggggttgtcgaggagatagttgccgtaaatggttatgaagcagtgaaaaaaaggtatctagcctgtctgtatcaaaatgagaaatcttcttttgatatggaaactttagtaccttggggtggagatacccaaagtctggtagtacgaaataaggtgtttgtccctatcagtcctgaagtgatgaaatatctttatcgtaacgaaaaaaaactttttctgcgaatattcctacgcatgtcgctctttaataaagcgtatatcagttggaatgcgataaaaaaataattggctgctaatgtttttcagaaaaagccgtaatttttgacagtattcaatgttggatttcatgcagccttaatagcgaaatggaatccttcgcgataagggcgggaataaaaatacgcataataatgcgatgttaaaccctaatcactcttacgcgactataataataaaacttcaataagacgctttaaaatacatgtgcgatccgccttgcatttcaaccattaggcgagaaaatgtaccgatcgcacattatttccaccatggatgtctgtcatatcgggttcgatgtgcgaatcagattaaaaatgtcattttttgataatcgacataaaaattggcttatacggtttctccaaagccccaaatcataactaatcataaggttagaggcattattatgaatttatttacacacactgatgaaacagactcctcacagccgccacaacactcggtgattgacctggtgactttcactgacgagcgtggttgcctagtcagcgtggaatccatgaatcaagttccttttgaaatcaaaaggcttttctacatcttcaataccaataccaatcaaaatcgcggctttcacgcccaccgtcgtgacaaaatgttccttatttgtctggtcggtaaactgcgcgttcgcctgaatgacgggatgaaaatcagcgatcactggctggacagtccctctaaaggcctgttggtcaatgacatggtgtgggtagaaatgcatgactttagtaaagactgtgcattagtggtgctctcaagcgaaaagtatgacaaaggcgattacattcacgattacgatgtattcatcgaagaggcaaaggccaagtatgaagaataaatatggcaaaaccatactgcttcgccccgttgaaaccagcgactatgaatttgttcacagcctgcgtgttgccccaaaaagtactcaatttttgacaccggttgatgatgacccgttgcagcaaaaagtgtggctcgaaaactacaaaaaacgcgaagccgcaggtgaagaatattatttcatcattcaacgtatcgataatcagcagcccgtaggttctttgcgtgcttacggcgtcgatcgtgagaaaagtattgcccactgcggcagctggattctcaatgaaaataaaaccatgacctcagcaatcgaaagtattttgctgatgctggaatctatgaatgatatagggattggtgtgttagttgtcgatgcacgtaaagacaacgccccgccttacgcttcatcaagaagatatcgcatcgctatcacggcgaggatgagacgaatcatttttacgaaatcgatgtcccggtaatgttggcgactttctacaaagaaaatgaacactttattttgccagatgctccagaaaaggatgcgtaaatgatcaactttctcaatctcaagaaaatcaatacaccctatgcggaagatcttaaagcagcaagcgcacgcgtgattgattccgggtattacattctcgggcctgaagtccgcaagtttgagcaggaatttgcggaattttgtggggtgagaacgtgtatcggattagcgtccggactcgatgcacttgtgcttgtgcttcgcgcctggaaactgctgggtaaaatcaaagacggtgatgaagtcatcattcaggccaatgcctatatcgcctgcgtattagcgataacagaaaacaatttaaagccggtgtttgtagagccggacgccgatagctataacatcgacgtcagcaaaattcgtgaagcgattaccccaaatacccgagtgattatgccagtacacctctatggctacctctccccgatgccagaaatcatggaaatcgcgcgtgagtttaaccttttggtgctcgaagactgttctcagtctcacggtgctacccttgatggacatcgtgcaggctattggggcgacgcctcggcgttcagcttctatccgagcaaaaatctcggcgcgctgggtgattctggtgctgcaacgaccaacgatgaagaacttgaggcaaccctgagagcacttcgtaattatggttctaaagagcgttattataatatttatcagggtgttaatagccgactaagtgaaatgcaggccgcccttctgagcgttaaattgaagtatttctggcctgaagtcgagaaccgcaggcgtattgctgagcgctatctcgccgggataaataacccgatcattaccttgccaaaagtcgctaatcgcgaacagcatacctggcacctgttcgtagttcgcagcgcacatcgtgatgcattaaagcattacctcgagcaaaacggcgtggagacaatcattcattatcctaaacctccttatttgcaggaagcttacaaggaaatgaatcatttaagtttcccgcttaatgaagcgattcatgatcagattttaagtctgcctgccgatccatcgctttctaacagcgatgtagagcacatcatcgaagtttgcaataagttccgcgcgtagtttcccttataagaactcggccatttcactggccgaagttaataatttgccctgggcaacgtttcaaaattgttcatctatttcacagcagaaaatatcgggtactcttctgcaaagttcagtctatacctctctatatagctactctttataagccgccctttattcattccgttgcgcacacttggtgcagtggggaacagccggacagtctctggccctaaccagaagtgacatgagatcatgacaatttcccgaagaagtttgtttcgctggcttgttccctcggcagccgtcggctggctcggcggaagtcgtgccaatgcggcagaacctctccagcatgctcaggcagtacaaggcagcgagtcaattgcagctgcagttgaaaatttaaagtcgctagacggcgcaggaattaccggttacgcccttaaacatccgtatggccgaaatacggtgggtgcgaaactcaataactttgtcactattgaagattttgccgatgcggacagcgccagcggagactggagtacggcgattaacgccgcgctgaagtacgcgattaagaacgatatccacgacgtttatggcaccggcacctacaacataagtaagcccatcatcgttgagtatctcggtaaccgaggtctaaacattagtatttcccacctggtagccaataaaaactggcaggaaaacaccacattgtgggatgccttaccgatgattttcatcggcgatactgacggtaacattaccggcctgaatctgcgtatcaatatgctcaatggcgcaggcaaggcagacgggatccgggctaaagacaatggttttgctttgtgccaactacacattggtgatgcaagaaactgtatacgcgtcatctcaaacggcgaacacacctggccaaacggcgccctgcagattaccggcgacttttggactgaaaactggctaggcgtacatatcacgcgtggcaccaaaggcacgacacctatctcggaatcatggaagataaacgtcaagtttgttgccaacaatcgctacggaggcattctcctgcgagggggatctcaatactctcagcttaccggcgaccatgactacaacggacgttatttatccatcgtgcaagttgacagccttgaaggcctgtctcgtggcaaaattgtcagtaatggtatcaccagaagtgaaatcctgatggcttaccagactcaggggaagcatggttaatgctgatggaatcgaaagatgtttcgatttctcaggggacaaccagcagtttctcgaaaggtcaaacactgaccgtttcgggcaaatcgtcaataaaacgtaaaatattgcaggttcagcgatgtggcgataatccttcagggacgaattatgtggatattttgcatgattttgaaggtgagcctttcgctaagattcaggctttgctaggttactgtagtggtatttatggttcgatgttatttacatcgtttattaccgctcaaaacggtttctcaggaacgaccgacggtttgcgaggcatgggtattgccaattcaggaacggcgctgtctctatataaccgtgcactgagtgaagaacccgtagctaatttcactgcagatttcgtcaatttccaaaaaaagctctacatgcaggctcatctgtatgaaggaatagggacggcgcaggtcatcgggcgttcctcatcggaattcacgacattatttacgctgcaggagtctcctttagacaggtaccttcaggagctcaatctttataaggtttatatcaagacaaactttcttggcgttgccggtgagtttttaattagcctaaccgctgatcccgcagaaaagacaccgatggtcgctcaggcggtgttttggaaccaaggcgcttttgcctggcgtgtatcgggctatgattttcaggtcaggcaggaagcgactgatcaaatgcagtttgtcgccaacatattacgcgtctaaaagtgaagttggtttacgaatatgtaggaagcagatttgaatcaggcagggcaactctgaacaaaaaaggaactaaaatatcgaaattcacccttaaagcacacagacaaaccagaagataaatgtctgtatggctcactctgtaatcgttattgtttgttcagaccgaaattcgattaagcaaaattccataaccacatttattagtgcgggattaataatgtcagaaaaaaaagacgcaggattcgccaagatggaaaccaacgcaaatagcctggatctgggtcgcttatatggcgcaatcctagacgaccgaaggctggtgattattaccgttgtggtgatgatgctattgggcgtagttttttactttttcgctacaccgatctatagcactgacgctatggttcaggttgaaacaaacgcaggttctgcgttaatcaacgatctttccaggcttttaccagattcacagcccaagtctgacgcacaaattaagatgattaaatctaaattggtgcagttcaagactattcaggaattgaatctcgacatcgaacaggaagaacatttttacccgttatttggtaaaggctgggcgcgccttacccaccaacccacaatatgctcgaaattggccatctacaggttcccgataccatgctaggccagtggctgacattcacggtcaccggtcccaaaacttttcagctcagctttgacggtcgtcctctggtaaatggtaccgtcggacaacctgcgaccgctgatggtgtttctatcaccgttgataacctgcaggctaaagataatactgtttataccgtccgtaagctgcctatccgcgacgcttatgacaaactggttgcgggcttgtccgttgccgatgccggtgtagatactggtatgctggaaatgacgttgaagggtgaaaacccgctgcgtgaccagaaagtcctgaacagcatcgcaaacaactatgtattgcaaaacgttcaacgtaattctcaggaagcggctaacagcctggagttcctgaaacagcagctgcctttagttcatgaagagctggatcgttcagaagacaaactgaatgctttccgtcagaaaagtgattctgtggacatgagcctcgagattcgttccgcactcgacaccatggtaaacctggataactcactgaatgagttgacgtttaaagaggccgaaatctcccagctctatacgccagagcacccgacctatcgtgccttgcttgaaaaacgtaaaattctggaagacgaaaaaaccgcacttaacaagaaaatcagtagtttgcctaacacgcaacaagagcttctgcgcctgaatcgtaacgtggattcagaacaggaaatcttcatgcagctgttacgtaaacagcaagagttgagcattaataaagcgagtactgtgggtgatgtacgcatcgtggactacgcaacttctgaagtggcgccagtcttccctaaattgagccttatcgaagcgtttgccgctattctgggtctgctgctggcagtgaccttcatcgtgatgaaaatcatgatgcgccgtggtattgaaggtgcgcgggaacttgaagagcaaggcattaccgtttacgcgaacgttccttttgcctccaatcaaagccgactggccagcatccctatcctgggtaatctgagcaagaataataaggccaagaagagcagagaagtcctggctatcaccgacccggccgaccttaccgtcgaatcgctgcgtagcctgcgtaccagcctgcactttgcgatgattgaagcgaaaaacgatatcctgatgattaccggtgcggtacctcaggcaggtaagagcttcatctccgttaaccttgcggccgttatcgcgttgaccggtaagaaggtgctgctgattgacgccgacatgcgtcgcggttctgcacacgaatacttcggcttcaacccacgtaaaggactttcaagcgtacttgccggacagcagacggtttctgaagtcattcatgagaccgagatcccggaactgcaggtgattacccgtggccgtacgccgcctaacccagcagaacttctgaccagcaagcgttttgaagatttactggaatgggctaaccagaactatgacctggtggttatcgataccccgccggtgctgtccgtaacggatgccagcatcatcggtcagattgtcggtacaaccatgatggttgcgcgcttcgaactcaacaccgttaaggaagttgaggtcagtatcaagcgtctggaacagagtggggttaacgttaaaggctgtatcctgaacgccatcgtacgtcgctctgcgaactactatagccagaactacagctacgacgcattctatacttacgagtacaaacgccacatcgataaagactaatcgtgcaggcctagctggctgccaggcaagtcatgtgccagtccgaatgcaccctttataaccttgagataaaaggcttataagttctctggtgtattcggtactggcattttttattgctaaatttcctgtctaccaggccaacgttcaccatgaaacaatacatctcgaagatcttcagcagcggatttatccgcaatatatcctggaatttgctgggatatgccctgccggtcctggttgcgatcgttatgatcccggtagtcatgaagcacacgggtctggaacgttttggggttctgactctcatcattgtgctgataggctcaatgaccgtctttgattttggtattacacgctcggtcaccaactcggtgagaaaatatctcgatgagaaaaatgagcgggccatgctgaccgtggtgaaaaccggttggttaatgatcacctgcgttttattggtgatttcggtactgttctgggtcgagagccgttggatagccgagcatttctttaacgtatccaatcagcagatacgtgaagagatcgccggtagcatgaagattgtggcgtttagcctgccatttgttatcgcacaaaccatttttgtcggcgtaatggaagcctttggcgccttcaagaagataagcatcggaaaggcccctttttcgatcctgatgtatctggttccaatgatcatctcattcttcaccccaagtctgttctacatcaccctttcactgtgcattttacgctgcattatggccgtcgccttttacctgatgatgcgcagcgaaattaaaacggtaacgccgatctcgctgatgagcgtcccgaccaccaaagctatcgcactcgaactggtcaggtacggcggctgggtgtcggtggggaacatcattgcgccgattatgctctatatcgaccgcttctttgttgcgtctatcgtcggggccacggtgtttgcctactacaccacgccttacgatgtggtttcacgtatcgccatcgtcgcggtaagcgtttgtggcgtactgtttccgatgctggtcaccaagattgcgaccgatattcgcagtgctaacgcctacttcaacaaagtcatgctggggattttcgcgatactggttatccctgcggtagccggaatattcctgtcgaaatggttcctgtcggtgtggattaatccaggattcgccgaacactcgtggatcatcttttcgatgtttctggcgggtatctggtgcacggtctggttcaaccggccttcgtgtggatccaggcctgtggaaagccgtggattatcgcgatgtgtgagattgtcgacctggcgctgtacgtgatttatctgccgtggatgacccatcattatgggattatcggcgcggccatcgcctggaacttccgtatgctgctgagtctggtagtgctgcacaccctccgctatgtgctctattcccgcgagcttaaacgcagtcggttggttgtttctaccctgtcttgaccctgataataccccgctctgcgcctctcagcgcagagcggggtgacgtagagggttacttctcgccgaaatgaattaccgtacgaattgatttgccttcgtgcatcaggtcaaacgcttcgttgatgctctcaagcggcagcttgtgggtgataaacggatccagcttgattctacccgccatcgcatcctctaccatccccggtaactgagaacgccctttcacaccgccaaacgctgaaccacgccatacgcggccagtcaccagttggaacggacgagtacgaatctcctgtcctgcgcccgcaacgccgataatcacgctctcccccagcccttgtggcagcattccagtgcggcacgcatcacgttgacgttgccgatacactcgaagctgaactccacgccgccgtcggtcatctcaacaatcacctcctgaatcggtttatcgtaatcatttggattgatgcagtctgttgcgcccatttcacgcgccagctcgaatttgctcgggttggtgtcgatggcaatgatgcgaccggctttagcctgtaccgcgccctgaatcgccgccaggccgataccgccgaggccaaaaatggccacgttgtcgccctctttcacctttgcagtgttatgtaccgcaccgataccggtggtcacgccacagcccagcaggcacactttttccagcggcgcttcaggattgaccttggccagcgaaatctccgccaccacggtgtattcgctaaaggtgctggtgcccatgtagtgatagataggctcaccgttgtaggagaaacgagtggtgccgtctggcatcagccctttaccctgcgtcgcacgcacggcctggcacaggttggttttacccgatttacagaacttgcactcgccgcactcggcggtgtagagaggaatgacgtggtcgcccgccttcagcgtcgttacgccttcgccgacttctacgacaataccgccgccctcgtggcccagaaccgccgggaaaacaccttcaggatcgtcgcctgacagggtaaatgcgtcagtgtggcaaacgccggtatgggtgatttttaccagcacttcgccttttttcggtggagcgacgtcgatttcgacgatttcaagcggtttgccaggcccaaatgctacggctgcacgtgatttcataatgcttcctatcggtagataaacaggtggccttgtcgccggtcggcgcagaaggctatttcaaataagaccggatgaagccagagatttcatcggtacactgagttcgttcgttgagggaaggttcacccgccaacaacgtgtctttaagatgaatttccatcatctcggccatcaggccatttgcggcaccgcgaatggcggctatctgctggagcatggcaacgcagggaacatcgctgcccagcgcgcgttccagcgcctcaacctgtccgccaatgcgtcggatacgggctaagaccttctttttatcttctgctgaatttggcattcatcggatcctttatactatagggggtatagtatatgcataaatgagagatggcaatattgagtgtagataaagtggggggaatttcaggcaataaaaaagccgataacatcgagatgttatcggcttttcagagcgtttaaccgctgtagagacgtattacgccgtcagcagtttctgcgcggtgctttcaaccagcgccagcaggactttgatgtcttccagcgtaacggttgggttcagcaacgtcattttcaggcaggtgatgccgtcagattcagtgacgcccacgttagcgcggccagaatccagcaacgcatcgccaatcttctggttaagcaacgcaatatctgcatcgctgcttgctgccagatgctcaggacggaagcggaacagtacgcttgccagctgaggctccatcaccagctccagcgctggctgctcggtcacatactgtgcaacctgctgagccaaggtcacgccatggtcgataatctctgcgtattgcttctgacccaatgcttccagacccatccacagtttcaatgcatcgaaacgacgggtagtctgcagcgatttggataccaggtttggcacgccctgagcttcatcaaactcggagttcaggtaagccgcctggtagcgcatcagctcatagtggcgcgcttctttgagcaagaaggcaccgcagctgatggtctggaagaactgcttgtggaagtccagagtaatggaatccaccagctcaatgccgtccagatagtcgcgatatttctcagaaagcagcagtgcaccaccccaggccgcatcaacgtgcacccagatgttgtgttctgccgccagcgcagcgatatcacgcagtgggtcaatcgcgcccgcatcggtagtacccgccgtggcaacgatagccagaatctgctcgccgttggctttcgccagttccactttctcacgcagatcgttgagatccatacgcgcaaagcggtcggttttcaccagagtcaccgactggtaacccagacccatcaatgccatgttcttctgcacagagaagtgtgcattttcagaacagaagactttgatcttcttcaggtcgccggtcagaccgtcctgctgtaccgagtgcccctgacgcgcaaagtaagcgtcacgggccagcatcagacccatcaggttactttgggtgccgccgctggtgaacacacctgcgtcgccagcctgataacctacctgagaacgcagccattcaataagcttaatctcaatgatggttgctgatgggctctggtcccacgagtccatactctggttagtggcgttgatcagcacttccgcagcctggcttaccaccaggcttgggcaatgtaaatgtgcgacgcactgagggtgatgcaccgacaggctgtctttcaggaagaactcaatcgcacgttcaatcgccgcctggttgcccagcccctgtggattgaaatccagggtaatgcgttcacgcagctcagcaacggttttaccctgatacatctcgggttgttgcagccactgcacaaccgccgcgctactctgggcaatcgcctgctggtaggcttcagtactttgcgcagaagctgccagaatcgggtttaacttggacattagggtaaatcactccactcagacaggtttgatgccagcggccaacaaagcctgttcgaatttatccaggaaaatacccagttcttcattgctgataagcagggatggcagcaggcgcagtacgcaaccgccacgaccgccacgctcaaggatcagcccagcttcgaaacattttttctgcaacagtgcggacagctgtggatcggccgggtagctacccatgtgatccggcgcttcgttaggcttgacgatttccataccgatcatcagacccaggccgcgaatgttgccgataaccggataacgtttctgcagctcggccagctggcctttcagccattcgccctgcgcagccactttatcggccagattattttctttcatgtacttcagcgtggtcagaccggttgccatagcaagctggttaccccggaaggttccggtgtggtgacccggttcccaggcatcgaactctttcttgataccgagaacggccagcggcagaccgccacccacggctttagacataacgatgatgtcaggctcaatacctgcgtgttcaaaggcaaacagcttaccggtacggcagaagccagcctgaacttcgtcgatgatcagcagaatgccgtgttcgcgagtcactttacggatgcgctgcagccattcgacaggagcagggttaacaccgccctcgccctgaacggcttccaggatcacggccgcaggtttacgaacaccgctttccacgtcgttgatcaggttttcgaagtaataggtcagtgccttaacgccagcttcaccgccaatacccagcgggcagcggtactggtgtgggtaaggcataaactgcacttctggcatcatgccattgacggcttctttcggagacaggttacctgttaccgccagtgcgccatgggtcataccgtggtagccaccggagaagctaatcacgccagtacggccagtatgctttttagccagtttcagcgcagcttcaacggcatcagcaccggatggaccggtgaactgcaggcagtactctttaccctgtccaggcagtaaagacagcaggtaagccgagaacttgtctttcaacggcgtcgtcaagtcaagcgtatgtaacggcaagccgctagtaatgacattttggatgctttgcagtatgtcagggtgattatgacccagagccaacgttcccgctccagccaggcagtcaagatattgattattctcaacgtcggtgatccacacgcctaacgctttggcgatagccaaaggcagcttgcgaggataactcctaacattcgattcaaattcagcttgtctcgccaaataggtttcattgtttccatttaatgaatttgcacctaaagtatcaatacggacttcatccgtcatcatatctctcctacaactcgggttatcaggaacgccgcagttgaataaattgaattgaaaaattaaccgctgtgaaaaatcgcggccaatatagggcttttggggtatcttctcaataatttattttgtgtagatttgtttatccttttctatatgaatcaatatgttgttgatttattgcccgatcatgccacagataacctgccgagtggcgtttaataaggcacgaaaaaaccctttttggcggaaaaaaccgacctttcaggggccgataacaggtaaaaaaagcggccagtaccgactttaaagcaatgtgaatcaacggatagctatgaaactcagccccgacgacattcttttccatcgcggcagtcttctcgacgccaatggattaatccacgcatcctacgattttgagcaggatgaccaaattctcggcgactactttgccttgacgccagaaattggcgtagccaatgcctcgtctcagcctattgaaacagactattcaacgataaaaactctgcacatcatcaatggcatgggtgtcgctcttggcgactccatcattggactcaccgcgattcaagccttacgaacgttcaatcctgcgctcgaggttaaaatttatcggccctcgaaggcacccgattacgtcgagcaactctatgctttagccgaaggcaaggtcgcacactgccggcccttcccgtttcactaaaggcaatccccgagcaggatctacgcatcgatattggcaatcatgttttttggcccgatttctcgaccttgccgatgattgacttcttccttcaggcgttgggtgtcgctcctgacgcggtatcgccgttacttaagcgtaaccactggctgcaacagctcgagttgcccgcgatcgcttcaccctggcacagcggcggttatgtgctgttttgcccgactgcgagcacgcctattcgcagcattcccgcgaacctgcacgtcggcatggttgagcagctgtggcagaaatatgcactcccgatactcgggtttgcggatgtcgttcatcctcgttacgtgaatattagcagattctcaaccaaaactgttcattttttaagctggattaaacatgcagccgcattaatgacctgcgattcggcggcagtgcatgccgcagcaggctttgagatccccacgactgcgttttttacctcgatcttaccggagttccgcgtgcgggattacccgctatgtacgtcgtttgtcgtggacgtccctgagctggcattgatgcataccagttcacagagtgcgcacatcgccgccgtcgaaaaggcatatcaaaggctcgctaatgatttacgccttctgtaaggtcttttttttgggataatctttaggcggagacggatgaaaaaagatcaagccgcatggcgtcgcggtgaatacgtcataacaaccgataaatctcccctcgacaggacattcattcacgctttcctgagccgttcgacgtgggccaaaggcatcagccgggaacggcttgacgcagccatcgacaacagtctgtgttttgggctctataaaggcagtgagcagatcggatttacacggcgggtgactgacttcgccacctttggttatctctgcgacgtgtttattatcgagcaccatcagggacaggggctcgcgcgctggatgatgaattattgtcttgaacacccgaccttaacgcaactgcgacgcattatgctggtgacctcaacggccgccgggttgtatgaaaaggtgggctatatgccggccaataccgataactttgtctggcagataaaccggccggaaatttatcagcagagctaaaactccccgcttcctgcgtaaggaatgcagcaagcaaggaggattttatagccgcctctcagccaagcatcttaagtgcggcatcaaccactgactgcatctcttggctgctgcggcctgttttgcctaccaccctcattccctgcgtcatacagagaatggccgtgccgacaatttcttcattaaccgtcgaggctatcgaaccgtcctctttgcccctgagaatcagcgccttgagcatattttcactcgcggcgaggctgagcttcagcttgagggcaatctcgtcgtcaaacgttaacagctccgtggtgccgctgacgaccaggcacccgagaattccctgttcaccctgcgccgaattggcgtaaaaacgcagcgcatgttccagttgctctcgcccggttatcccctgcgagatgttggcgtctagctgggcattgcgcacgcttttataacgatcgaaggcggcaataaagatcgcgcgcttgtctttaaacgccttataaacgctaccggaggccaactccattgcctgggttaaatcgctgattgaactggcgtgaaatccgcgttctgaaaagacttttatcgccttgtccaatgcctgatccatgtcaaattctcgcggtctgccgcgctgtcttgaaatgatatttttttgagaggaaattttattttcattcatcggctcaatatagagaatgatgatttcctatacaagaggtaccttgaagcccctactattaaaaatattaaacctttgactttataataacgggcggtgaggtatgagagttacatatcaaacgaggaaatacagagattgcggctttcatggcctgtgaacccctaagatagggcaaaccagggggagttcgctcccactggttggattggcaaacagtactcctgagcctcctttattaaaaagccagccctttcaggctggctttttatattactttcaatcacctggaacgcgacgagataatctcatcggcgacgttacgcggcgcttcagcatagtggtggaactccatgctgtaagtcgcgcgcccttgagacattgaccgcagcaccgtcgagtaaccaaacatctccgacagcgggacttcggccttaatcagcttgcccccgccgcccagaatttcctccatgccctgcaccgtcccgcgccgcgaagacaggtcacccatcacactccccgcgtagtcttccggtgtttccacttcgactcgcataatcggctcaaggataaccggactcgctaaccgtgccgcctctttgaacccaaagatagccgccatcttgaacgccatttccgatgagtccacctcgtgatacgacccaaaggtcagcgtcactttgacatccaccaccggataaccggccaaaatacccgtgttgagcgcctcaaccacgcctttctccaccgcaggaataaattcacgcgggacaacgccgcccttcgtcgcatcgataaaggaaaaacctttgcccgactcctgcggctcaagcgtgaaaacgacgtggccatactggcctttaccgcccgactgacgcacaaacttcccttcgacgtcttcggctttcttacgcacggtctcacgatacgtcacctgcggcttgccgatgttcgcttcaacgccaaattcgcgcttcatgcgatcgacgataatctccagatgcagctcgcccatcccggaaataatcgtctgcccagactcctcatcggtgcgaatacggaacgacggatcctctgatgccaggcgctgtaacgcgatgcccatcttctcctgatcggccttggttttgggttcaatggcctgcgaaatcaccggctccgggaactccatgcgcaccagcgtgataatctcactcggatcgcacaaagtttccccggtcgtcacctcttttagccctacacaggcggcaatatcacccgcacggatttcgtccacctcgtgacgcacgttggcatgcatctgcacgatacgcccgatacgctctttcctgccgcgaatcgggttatagacactgtcacccttcgacagcacgccagaatagacgcgcacaaaggtcagttggccgacgtaggggtcggtcatcagcttgaacgccagcgcggaaaacttctcgccgtcgtccgcgtgacgatgcacctcgttgccgtcttcgtcggtgccgattaccgcaggaatatccagcggcgaaggcatcagctccacgacggcgtcgagcatgcgctgtacgcccttgttcttgaacgcactgccgcagagcatcggctgaatttcaccggcaatcgtacgctggcgcagcccgaaggtgatttggtcttcgctcagctcgccctgctcaagatattgggtcatcagctcgtcgctggcttctgccgcggcctcaaccattttctcacgccatgtctcggcgctcgcctgcaactcggcgggaatcggggcatagctgaacgtcatcccctgcgtcgcgtcatcccaaaggatcgcgcgcatcttgcgcaggtcaaccacgccggtgaagtgctcttcgctgccgattggaataacaatcggcaccgggttcgccttcagcctgtcaatcatcatctgacgcactcggaagaagtcagcgccggggcggtccatcttgttgacgaacgccagacgcggaaccttatatttattggcctgacgccacaccgtttcagactgcggctgcacgccaccgacggagtcatagaccatcaccgccccgtcgagaacgcgcatcgagcgttcaacttcgatagtaaaatcgacgtgcccgggcgtatcgataatattaatacgatgctcgtcaaacgtgtggtccatcccccgccagaaacaggttaccgccgccgaggtaatggtgatgccacgctcttgctcctgctccatccagtccgttgtcgctccaccgtcgtgcacttcacctaatttatggttcatgccggtgtagaacaggatgcgctcggtggtggtcgttttaccggcgtcgatgtgtgctgagataccgatgttacggtagcgctcgataggagttttgcgagccatataatgtccttagtagaggatggctaatgaatcaggcgggaaccatttcccgtcggcgttgatagattgctgtaccgcgaaagcatactacaattgtacgagtatatacgaacaatcgttgtttactatcagtgctatcgtcctgctctttggcaggaacattgcatcggcaagcggctgtgggctatgatccgcgccttgcaaagcctcgtgccatccgggcttttacgccgaccctatgagtatcgaacaggaaagatatgattgccaaccaccctgaacgcgagcagatccgcctcgaaaatgtcctgactgcgttaggcaatccattacgtcttgcggtgatacaaaagctggcagacgggggtgaatatccctgcggcatgctgctacagggattatcgaaatcgacgctgactcaccattggcgggtgctacgtgagagtggggttatctggcagcgccctgacggtcgtgccaatctgctgtcgttacgcagagaagatttagatgcgcgattccctggcctgctggactcgctgctgcacgcggttgaaaacgacaatatcacgctggaatccaccgcccgacatcgacgaaacgacgacgcggcaaaataaacgctcctaactcatctcatcaagctggcctttaaccagcgcgcagaatgtcgcaatcatcgccgaagactccttgcgctgcgccaaaaacagcggcgcatgcagtttggcctcgtcggaaagtggcaggtagaccacgccctcaccccgagtcgcaccatacaggcaggcacgatcgacacccccaatcccgccccaccagactcagacaggaggtcagtcgcggcgcctcctgaacaatgcgagggctgaatcccgcgcgataacaggcggcaagaatcgcgtcatacaatccctgtccggccggacgtcggtacagaatgaagccttcgttaataagcgtcttaagctcgaccgcgccatcgccaatctgtgccagcggatgcccaaccggcagcgccaccatcatcggttcctgcaagatacgttcaattttcagctccggcatgcccagcaccggcgtgcgcacgaacgccacatcgagcgtacggttaaccagcgcctgtaacagctcggtactccccgactcctcaagctgcgcagtcacctgcggataaacctcgcgatagcgccgcagcacggtcggcacgaaggcatgcagcgcagccgagctggtaaaaccgatccgaatattaccctgcttaccttcggtggctcgctgcatcgtcgcgctgagattttcggcgcgttccagcagcgccttggcctcctgaaacagcactcgacctatctcggtcggttcaacaccgcgaggatagcgcgccaacagtttcaccccgaactcctcctccaggctctgcaaaagccttgtgaggggaggctgctggataaacagacgctgcgccgcgcgagtgatattgccctcttccaccacggtgacaaatgcccgtagacgttttaagtcaatcgccgccataccttttaggtatcctttatagtcttcaaatgcattagacacattgatatctcaactggcatcatacttaaaaaccatacctcaattaactcttttattattaccgagccctttgatgcctgcacccgtgaataacaatgccagtaccgaacaggttatcgactaccacgcgtctgcgcccagctgccgtgacctctttatgggcttctttattttaggactcaccggcttcggcggtgttttgccgatggcgcgcaggatgattgtcgagaagaaacgctggcttgacggcaatgaatttaccgagttgctcggcctgtgccagtttttgccggggggcaacatcatcaacctgtcggtagcgttaggcaacgagtttcgcggactgcgcggggcgctggcggcaattttgggccttatctgcgcgccgacggccattgtggttggcctgggtctggtttatgcccgctatcagaatgacccggtggtcgagcacctgtttgccgggctcgcggcgggtgcggccggactgctgctttcgaccggcatcaagatgctgctgccgctgaagggaaaatggctctcgctggctattgttgccgtcggtattctcgctattgccggtttacgcctgccgatgctgcttgtgatgctggtgctggcaccggttagcatcctgctttactggagaagccagaaatgatcggcgtattaatcacgctggcgctgctgtttacccagctgtcggtgatggctttcggcggtggaaacaccattttacccgagatgcagcgcgaggtggtgcagaaccaccactggatgagcgcgcaggagtttagcgccctgttcgcccttgcacaggccgctcccggcccgaacatgatgattgtgccgctggtcggatggcaggttgccggatgggcgggtctgctggtgtcatcgctcgctaaatttgggccgtcgtcaatcatcaccctgttggtgatgcgcggctggaagcgttacaaagacaggccgtggcgtcaaatcgtacaaagcggactcgtgccggtgaccgtcggactggtggtttccagcggactgttgattgccgaggcgtcggccaccagccttgcgcttggcggcgtcatcctgctctgcaccgctttagccatgaacaagaaaatccatcccctgtgggtgctggcagtcggtgccgttctcgggctggttttggcctgagtcagaggactaagtcatacaaccgcgttgcgacaatcgacaggtagcctcagggaagaagctcttgtcggttgaccccttcaaacacctgctccaacacgtgaatcaccgccctgactttggccgcgcgctgtaaatcaggatgcagcaccagccagatatcgacccagtccttgctctcgggaaaaagacgaataagctgcggactcttgtcggccagaaacgaagacagcaggccaatccccaatccctgaagtgtggccgaacgcagcaacagctgtgagtttgactgcatgacgacgttgggactggtgagactctctccgcaaaaattagcccagtgccgaggtacagcatcgcgcggaaacatcagcagatcgtgcccctgtagctgtgtgccttttaccggcatcccttttctgtcgagatagtcttgagtggcataaagccccatttcaatcgtagcgagccgcttgaccaccagcgtatcctcttcaggacgaacgccgcggatagccagatcggcattgcgataggatatatcatagacgttgaccgccgtcagcagcgaaacggtgatttccggatactgttgacgcagcattttaatcgccgggatcacaaaggcctccgccaacgtatcggtggtggtaatcaccacgttgccggacggactctcgtcaccatggctggccttgcggtttatcgcgctgacggcgttttccatctcgataacgtgggtcagcagcgcttcgccgagcgcgctgagtgaaaaggccttaggcgtgcgaacaaaaagcttggaacctaagctgtcctcaagcgccgtgattctgcggcctacggtcgcctgatcgacattcagttcaccggcagccttacgtaacgtcccacaacgcgctagcgcaaggaaaaaacgcgcatcatcccaattcatgttgaaatttccgtttcccaagagggtttatgttaagcatgcaatattgaatcaccgtgatgcattcttgtcgattttttctcttgttactcaaggctatgatgcgcgcatccctgaatccgcccgccatacatcgacacgtatggcgggcgattgccgggtcatccattgggttctcaggagtaccgcatgtcatcaagtcttaacgttgaacagctcacctcccggccgtctgccggtaaatcacattttgccattttactgtttctttcgatggcactgatggctgcactgctcaacagcagcgcaccgacgccgctttatcccctctatcaacaacatttaggtctgaaagcgatcagcctgacgataatctatggcgcttacgccgggggcgttcttatctcgctgctgggtatcggcaatgtggccggacgcattaccgatctgcggcgcgtcattctgcctgccctgctgattgtgttctgcggtgcgctgctgttttcgctggccgataccttttggctgctgttttttgcccgtttgctggcaggcgtagggaccggggcattaaccggggcggctaatattgccctgctgcgcttcggcccccaagattctggcaaaatagccgcattaattgccaccgtctcttttactacgggtcttgcgctcggtcctattttcagtggcatcgccctgcaaacgggatttcatcccactacgttaccgttcatgataatcatgggtctggtggccattgccatggcgggggtctcgttgaactggccgttgagcgagaaagtttctttgactcccctctcttccgaaccgctgcacggtggggataccagcctgaagtcaggcctcaaggcgacgggagcaaaattcgtcttgtgtgccctcgcgctattcacctgctggggcgtcgccgccagcatgctgtccctcgggcccaatgttgcagagaggctgctgggactgcataaccgcggcgtatttggctatgtgatagcagcctatctgagtatcgctggcataagccagatcctcagtcgcggcattaacgcccgtcactcgctgattgttggctgtctgatgcaggcgttgtcggtgattattttttccgccgccattgcctggcactccctcgcgctggcggcagttggcatcgttattggaggttatgcctatggcgctatttttgtcggcagcgcgacgctgctgaacaggatttcccccaaggccagccatgcccgtttaatctcgctgttttatgtgattgcttacgtcggcaattgggtgccgattctactgggtaaggtaatcgattctggcggtctgttgctggcgtcgcatctgctgtttacgctgagtaccctcacctgcctgatattggccttcagcgtaacaaaaaccgatttttaaaggcgcagctttaccggccccttgagcgttcaatgctatagttgcttcagggggtaacatgccaaatcctgagccacagaccgatgaatcagaatacgttaccgaaacgggagaagtcagtgccacactgtggaaaattgcctgcgtcacgatgcttggctcttttatgtctcagctcgactctaccctggtcaacgtctcgctagacagcctttcgcacgacctgcacgcttcgctggcgacgattcaatgggtcatcagtggctatctcctggcgctgacgctggcgttgcctctcaacggctggctggtgagtcgtttagggactaagtcagtgtatatcgcctgttttatggccttcaccctcacctcggcgctctgtgggctggcctggtcggcaaattcgctgatcggctttcgtattttacaaggcatgagtggcggcctgctcgcgcccatggcacaaacagtgatagcgcgagccgcaggcaaaaatttggcgcgggtggtcggatatatttccgtgcccgtgctgctggcaccggtatttggccccgtcgttgccgggagcattttgcacttcgcctcgtggcgctggctatttctgatcaatatcccgattgggatcgtcgccattgcgttagcgtttcgctttctgccgaacgctcctcaagagaccaccaaaagcccgctcgactggctcgggcttgccctgctttcaccgggattggtgatgtttctctacgccgccggacaaatttcaacgccctcagggcagataatcctcagcgtttccctgcttctgatagccgcatttgtgtttaatgcccgtaaaaaacggcagcgtgcgctgatagacatcgcgttattccgcaataaaaccttctcagtagccgctatcacacagtttctaaccaacggcgtgatattctcgggacaaatgcttattccgctctttctaatgcgtctaggcggtttttcacctaccgaaatggggtggatgatgttgccacagggattggggatgatgtgcgccaatccgctaatggggatgctgacacagcgttttggaactcgctacgtgtcggcaggaggggcactgctctcgctgctgggatgcctgccttttatcctgatggcggcagaaggaattcctgtgccggtgctggcatgttcgctgtttattcgcggcgcagggctcagcgccacggggattccctctatggcggcagcctataggtcagtagaacgcaacgtcttgccgatggccaccacgacgctcaatatttcacaacgaataggcggacccacattgacaacactttgcgcactatttcttcagtggcagatcgaccttcagacgcacattaccccatcttcacgtccctatctctccgcgttcatccttttaagcgtactgcacagtttaattatcatcagtgcaatacgcctgccgaaaagaaaggattaatcatgcctgagcgatatccctttcaatataatgatgattatctttataaaactcggtcattattaccggcatgtctatttcgtaataaaagttggtggcatcttcgctatgaaaacgttgggatattttctttataaagcgaagggccattgcatgatctttacgtgcatcgacaatcacttttttcattcctaattcatccattgcttcacagagtaataaaatactttctactgccgatgtcatcgttttattctcattaagaatccaactgccgcactgtgcggttttcttctcattatcaatattataagcgcgtaaagaacccactgactgagcattatcgacgcgttgaatgagaaaataacactcttcccctgcatcctcacgctttttatattgctctaaccaacgtttttgttgcaaggggtcatcatcgacaatactcagaaatttcgtactcttaggcgcaacgcgtaggctatgtataaactcgtaatcactaatttctaccggacgtagaactattgttttgccatgaaaacttttcattagttttaccctcttggataaaattattaaaattatagagataatcgtcggcgtcgtagctctcactggcaagcaccactaacgcacagtcatcgctcaggtcatgcatttccagccacactcgcgggtccagcagcaacgccctcgaaggcgtatcaagccagtattcgcagtcctcagcaccgtcatgcaacttcactcgcagcttacccgacaggcaaataatcaattgtttacttcgcaggcaggcataagccagtcgaccttgattcttgttattaaaaacatatgagaatctatttacgctgaaaggaacccgattagaaaattcgatgctaatcagatatccccgcccatcggtaatctcctcaagttcaactaatgatatctttcgccctttaatattccccgacgcaatgtctgaaacggataattgcatagcatcaccttctaattaataattagattgttatagatatctagactaaaggaagttaatcaagcagcgccaggtaataagcaaccgttagcacaccgccctattaagattattagttaataaatgagatttaaacaacatgacgcagattaacaacaggttaattcaaaaaaacctacatagaccccactcttgcaaggccttgcatgattattacagaattaatgcggataaacatttgcatttctcggaattttaatccgcatcattcgcccagacctctctccaaaagagcgccattttcaatttccttactgattgattacgctaataataaaatacagcctcaatataatcacccaggtttattaactgtcttcggccatcactgtttcaccggattgttgttttagttcaaaataacgaatttcggtatgctggcgaattaacgccgccagttcaggcgaatgactggtgacccacagctggctacagcggctggtttcagcaagcagcattgctaacgcgggcataagagagggatgcagactgttttccggttcattaaatgccataaaagccggtggcctcgggctaagcatagcgactgccaggcataaaaagcgcaacgtgccgtcggaaagctcggtggcttcaagagggcgaaaaattcctttccgctgcatcattatttgaaaacgccccatcgaggcatcaacgaaaaactcgctgtcggggaaggcggcagacaacacgcgatgcaacagctcatgattgcctatttcgttgattgtctgaaatgctgcggccagattgtggccatcgtgggcaagcaccggcgagcggatccccacctgaggcagacgcaagggagaacctggccagaccgcaaactcatgataaaaacgccagccttgtaacacttcacgcagctgagagacttctggatacaaatggggctccgagagctgcccaaaaatggactcatgcgcggcaatactgagtgggtaacgtacctgctcgccggagaaattggtcagcttcgccgtctggtttactctttcgaccaaacgactggacgggcggcggcgatgtcccgtcatccacagcgactcggattttacgctggggtcgaggctgaagagagtgttcgacagtgatgacatttcgtaacccagctggatttcgtaatcaaaatcttcaaacatggcagaaagctgcatcttactgtcgcctgtgcgtttctcaccggccatagcgccttctgaatccccccttcctgggccagtgccgcagaaagctgcccacgggacgcctcatgcatcagctttaccgccttataaaggttcgacttgccgcacccattggggccacagataacgttcagctgcccaagttccagctctaactgacggagggatcgataacctctaatctgcaattttttgacgaacatatctactatctcaacgttaatgagcttcaatgatagaggaaggtgttcaagttagcgtagaaaacaggtacgacaatctaaatgcccttaaaaaccttaaaaggcgatctttgctataattttgagaaagttttggcctgtttgaaatatttctttataattagcagccctgaaaaagtgattggttacacatcttgattcactctcaagcccctgtgtacatacaatataagggtcatcccggtgatatcgttccgggtaaaatcccataaactagtgcctgtgtggcaagaataaccttagaaaatatgaaaatgagcattcgcgcgatctttactttggttttagctgttgctgcgtatagccaggctgcatttgcagttgtctatccactgccggcaaacaatggccgtttagttggtgaaaacatcaccgtcgtagtgccacaaaacaacaaactgccgttggagcatttcgctgcacaatatcaaatgggtctggcaaacatgctggaagctaacccaggtgtagatacctacctgcccaatccaggcacggtactgactattcctcagcagctgatcctgcctgataccccacacgaaggcctggttatcaacagtgccgaaatgcgcatttattactatccgaaaggcaccaacaccgtggttgttctgccaatcggcatcggtgaactgggtaaagacacgccgttgaactgggtaacctccgtgcagcacaagaaagccggtccaacctggacacctacggcgaaaatgcacgaagaatacgcggcgcaaggccagtggctgccagcgaccttccctgccggtcctgataacccgatgggtctttacgcgctgtacgttggccgtctctacgccgttcatggcaccaacgccaactttggtatcggcctgcgtgtaagccacggctgtgtgcgtctgcgtgatgccgacatcaaatggctgttcgaaaatgtgcccgtcggcacccgcgttcagtttatcaatgagccagtcaaaacagcggtcctgccgaacggtgcgcgttatatcgaagttcacaacccactgtctgctaaccagcaggagtttgattctcagcagccgctgccaatcaccctctctggcaacaacgcgaccctgatggctgacccaagcgtcaatcaacaggttgttgataaagcaatctccctgcgttcaggtatcccgactcaggtaaactgaaagcagttagtacagcaatagcctgtactcaagcccctgcagtcccgctgcaggggcttttttatgctcaggatttagcctctgcggcccaaaccttcaccgctttacttattttttattcttaagtacaacttatggagactttcaacgccgccgtgctggcccgccccttgcccactggagattttatgccgcaactatccgccaacgcactggccattcctgcatcagggattcgccgcatttatgagttggcttctgaactcgacgacgtcattcaactgagcatcggtgagcccgagcggccggtcgccaaacatatcctcgatgcgggtgccagcgcatggaatgccgacgttacccactacacgcccaacagcggtatggcgctgctgcgttcagcgattgcggctaaacttgaacgcgacaatcactaccgcgtcgacgatgatcaaatccatgtgacgtcgggcggttcgcaggctctgcatatggcgatgtcattaacgctgaccgccggcgacgaaatcctcatccccgatcccggttacgccacttttaccatgattcccaggttgctcggtgccgtccctgttccctatcatctggccgccgaagaggagttccagccttcgataagtcatctcgagcgctgcattacaccgcgtaccaaagtgttactgattaatagcccgtcaaacccgctcggcgtggtctttagcgcagaaaagctgaccgaactgctacagtttgccgccaggcatgacctttgggttatcagcgatgaagtctatgaatactttaccttcagccgtgcgtttaccagcgtcgcctctctcgataccgacggccgcgtattcagcgtctattcggtttccaaaacctatggcctgaccggtggacgcgttggctacctggtcacgccaccgggcgttgcctcaactttccgcgcagcgcaggaggctaccgtcagctgcgtcaatgccctgcgcagttggccgtcgtggcagcactcgacggtccgcaggattacgtgcacgaggcgcgcgcgcactacggcgctaatgtcgaagcggcctgcgccacccttgaccagcgcggcatcccctatcaacgcccgcagggggcattctacctctggattgacgtttcacacgtcagcggaggagacgtcgccgcctgggccgaacatttcctgctcaccgcacgcgtcgccgtggcaccgggtgtggcctttgggcaggcgggcgaaggctggatacgcatctgtgcggcaggcaagaccgaacccttgcttgaggcgattaagcgcctgccgtcggtcacgtcctgatagagcgagccagaagccaagcgtgccaaccctcccactgcccgctgtttcagcgtcaaggggagcgtatccgtcgctccccttaacataagtcttacaccatactgtgattcccccagcaatttagctaaaaagagggagacctctttcgacttagcatgcgttgcaattgacagctcatctcaacctgccataacgttcccgccaaatacttaaattctcttaagggaataaggcctaccctcatgaacataaatagaatgcaaatagatcgcatattgaataataacgtggtgatcacgcttggggagaaccagcaggaaacggtggtgatgggtaaaggcatcggctttcaaaaaaaaccgggtgaatcgattaatccgcagctgatcgaaaaaatcttctcgctcaataacccttacagcgatcattttaaagccttgcttgaacaagttccggcgagttgtattagtgcgacggaagaaattatcgcactggctaaaactcgtctggcaaccaaactgcatgccagcgtactaatttccctggtcgatcaccttcattatgctttacaacgttttgctgaaaatatcaccatccccaatgcattgctttgggaaataaaaaagctttacgcttccgaattcgccatcggtaaagagtcactgcagattatttaccgccatactggcgtattgcttcctgaagatgaagccggatatatcgccctgcatcttgttaatgctcagctaaatgacaatatgcaaaacaccatgaaaataacccgttttatgcaggatatcctcagcctggtgcagtatcattttacgctggaatacaatgaggattcattaagctatcagcgatttatcacccatcttaaattctttgctcaacgtatttttgaccgtaagtttgtcaataatgacgatccgtctctgccaagactggtaagagaaaagtatgtagcctcacacgaatgcgcagaaaaaataaacaaatacatagcattgcatcatgaccatgcgttaacggaagatgagctcatgttcctgaccatccatattgagcagttaagaaaatgatttctacatcggtaaaaagggccatgagcgagtccctgtgaagcaactcacatttcacaaacattcagaaaacaatgcttgagcaagttaaatattacatttatatatattactcataacaggattgttatcttcacgtggtctcaagcgtgttgagcaaaacctaactgaagccacccgcttttatctagcctgggtcggcaaagttaggtttttttttgctttaaattcgcgtattaagttatccgacaagaggttaatttatgggatatgctattttgtgcgatgacgttatcgcaggcgtcggcggtcgggataatgttattagcgttattcactgcgcgacacgtttacgctttaaactgaaagacaaccgccgcgcaaacattgaggaactcaagaagtgtgcggggattattaccgttattgagagcggcggacaatttcaggtagtcattggtagccacgtcggagaagtatatcaactcttggtctcacgttattttccagaaaatgaaagtatcaattctggtgaagaatcatcggaagacgcccccaaagctaaaggatttaaagcactactcaatgccgcagtagatattatctccagcatattcgcaccgctgctgggtattttagttgcagccgggcttattaaaggggtattgatccttgcggtattatttcattggctcgataaagccagcggcacctataaaatcatctttgccgccagcgatgccgcattctttttcatgcctattcttctgggctatacggcgggtaagaaatttggcggcaaccctctcgtcaccctggttatcggggccgcgctggtccacccttcgatgatcgaaattttcaacgccacgcaggccgatcctaaactgcatttcagttttctgggcctgccggtgacctttatcaactacagttctacggttatcccggttattttcgccgcctggttcagctgctggctcgagaaacgtttcaaccgctggctgcatgcctcgataaaatccttcttcacgccgtttttatgcctgacgatcaccctgcccgcgactttcctgctgattgggccgctggcaaccgacctcagcctcggccttggccgcggttacctgtggatatggcagctcaacccgatgattgcaggcgccgtattcggggcgatgtggcaaatttgtgtaatattcgggctacattggggcctggcaccgctgatgatcaacaacctgatgacccgtgggatcgacaccatttctccgctggtgcagcccgccgtgtgggcacagtctggcgcaacgctgggcgtgctgctgcgtacccgtaatgccaaactcaaaagcctggcgggtccgtcgtttatctcaagcatctttggtattaccgaaccggctatctacggggtcaacctgccgctaaaacggccgtttatctttggctgcatcggcggcgcgctcggcggtgccatcaccggctactaccacggcaccgcttatgcctttggcgcgctgggtatctttggattcccgtcatttatctcacccaacggcatcgacggcggattctggggcgtcgtcatcggctcccttgccgccttcctgttcgccttcatcagcagctggctgtatggcgtgccggacgaccaacccgtgccacccgagaaactacgttccctgtcttcgacctgacgaacccccattttactctggcctaaataatgcgtgagctcggctcatgcgggattactgcgcttttttttttaccctaaacgagaaggaataaacgatgaaaaccacattcccgactgatttcctctggggcggcgctctggccgccaatcaggtagaaggtgcctataatgttggcggaaaaggcctgtcaacctccgattatcagccacacggcctgatgtatccggcgaccgaacgccctgccggggagtttaaccttaaagaaatagctatcgatttctatcatcgctatccgcaagatatcgcgcttttcgccgaaatgggcttcaaaaccctgcgcacatccatcgcctggacgcgcatctacccgcgtggtgatgaagaagtgcctaacgaagaaggtctggctttctacgatgcgctgttcgacgagatgctcaaatacggtatacagccgcttatcaccctctcccactacgagatgccttacgctctggttaaacattacggcggctggggcaatcgtaagaccatcggcttctttgaacgctatgccaccaccgtgttcgagcgttaccagcacaaggtgaaatattggctgacgttcaacgaaattaacgtgtcgctgttctcgtgcttcaccgggctgggactgccagagggcagcagcgaacaggctgtctatcaggccgtgcaccaccagctggtggccagcgcccgcgcagtgaagacctgtcatcgcatcattcctgatgccaaaatcggcaacatggttgccgccatgccgtactatccgctgacctgtcatcccgacgatttactcgaggcacagcgcaaagagcgcgaatggctgttcttcttcgacgtgcaggcgcgcggcgactatccgagccatatccaacgccgtttcaaagaaagaaacatcgagcttgaaatcagcccacaggacagagaagacctgcgcgaaaccatcgatttcctgtccttcagctactacatgagcagctgtgccaccgccgataaagacaaacaacaggccaccggcaacattctcaagatgatccccaacccttacctttcggcatcggaatggggctggcagatagatcccgcgggcctgcgccatctgttgaatcagctgtgggatcgctatcagaaaccgctgtttattgtcgaaaatggcttgggcgccaaagaccgcattgaggccgacggcagcatccaggacgattaccgtatcgcctacctcaatgaccacctggtgcaggttcatgaagccattgccgacggcgtcgaggtgttgggctacacctgctggggcccgatagacatcgtgagtgcctcaacctgtgagatgtccaaacgctatggtttcatccacgttgaccgtgacgatcacggtgaaggcaccctacagcgtcgtcgcaagaagagttttggctggtacaaacaggtgattgcaaccggcggcgaatcgctggtgagagaggttaaaaatgaaaagtaagtcgcttctgctgaccgcgctgttgatgagcatcggcgggctggtgcaggccgccgacggcgattgcgcccgctttgacaagctgctgcctaaaggacccgaaacacccagcattggctcggtgtgcgacaccgtcttccccgaatggggaggactgcgtcaggacatggcggataacggcttctttgctcaggttcagctgctgaccaatctgacctatgacgtggcgggtaactggaagaatcagccgagctacgtcggacagcgtcccaccaccggtaatgtggtgagcactaacgtgacctatgacctgtcgcgtattggtttcactgataatgcccaacttaatatgggcgtaatgtatgcctataacaactatcgcggcaacggccaggacggccacgttgccgtcagcgaactgtcgatatatcaaccgctgttcaatgatcgggtcattctgcactacggctattctgcctggttaagctatttttatggcctgtatctcggcagcagtaccgcgtcttcggcgcttggcccaccagcgtgatgctcaatcaggccggtctcaccagcctgaaacctagcccgggatttgacgtgcggctgctgtctgaaaataaacgctggtacgaccattttggcgtctcacgcagccaaagctctgacggactagaatcagactcgaaatacaatacctacggactgcgctggaaagtgcctgatgccggcacgctggtcattaatgaaattggctatcgcgtcaattcagaatacggggttccaatgatttgggtacgcggtggctcggtttataacaaaacgccttacttcaactacaactccgagcaggacgaggataacacctggtcacactaccttgccgcgacccgtcagctgacacagcccgacagcagcctgccgttccgtggctggtatatcgacggcaaaaccaactacgcaccgcagaaccgcaacgtgtttaatgccgatgcgtcgttaaccctgttcagcatcgggccatttgattcacggccgtccgacatgctgtcgttcggtcttgcctataacaagttcagcgatgacgccaagcgctacttcgagcggcacaacaagagcgccgagagtttcagtaccacggcatcgacggcatataccctgcggattaccaacgggatttactggaccaatcagctggcgtggacgcatcatccttctgttacgccaaaggaagatgacgcctggaacctactgacgcagattgtggttaatttgtagtttacatcaggcaggaaggttgacagaattaactctctctcaagaggagagagttaattccctgatttaaagcgattttagtgtgtattggcaatatcgtcttctgaaagtgcagaaggtaaaaggttaactaattggttgtcgttttttgcgcgactgcgccgtataaaaaaatctgcacgcctttctgtaccatcgcagatatctgggccatggtgtaggtaggcggttcctgcataaacatcagcacttcgacctcagccttgatgagcgacgtaaactgcaccgccctgagcatcgcgtcacccggcgctaaatcgccgtcctgcatggcgaccgacatgagctcggcgagtcgggccatgctctcctgcaatcctgctgcacgaaaaagttcgccaatatttgagttgcccgcctcggagagcacgcagcgatagattttcaacgctttgttatcacccgctaacacctccagcatacgttcaccaaaacgagtgagtttttcctcaaacggtatagagacacccgtaaaggcagagatctcggaggctgccgcattaagaaatttcgtgctgtgagtccgtacaaccatctcgaagagttcctctttggaagcaaagtagttgtacagcgtcgccttcgatccccctactcgtttggcaacctcattcatggatgctcctttataacctacctcctgaaacagctcggtggcagtgtcgataatggcttgcctgcgttcattcgtcagtgttctcatccagtctcccatgacagtcggatgttgttatctgtggtaacaaaactataactaaacagtacagttgaaatttgggagtattgcacactttgaagggttatattttcagtattttaaagggaagggaatacgctagctggttaataaacaaagtaaattatatttagaggctaagaattcacgaacaatcgagagggaggctttagcgaattaaaactaaaccaaacagtacagttttgtattgttcggcctctatcttatcgaccataaaatagacttatactcctgattatcgtcgcagtaacctaataaattgcatttcgctaacccgctgcgttgatgttagtgtactagtacaaatttatacacctggtgacggaaatgtcagcaaagaaagcaacattcatcggcctgatggctatcttgttcttcagcacggtcgcaggaatgattcgtagcgtttcagaaggtcttggaccggtcggcggcgcagcgagtatctactcccttgcttcggtcctgctgttctttacccagggctttccagaggtaaaaaaatttcctcgcctctacctctacctcggcagcctgctgtttgtcagctacgaagtatgcctgtcactgtcgctgggctttgcccatacgcacgctcagacgattgaagttgggatggtcaattatctgtggccaggcctgaccattttgatggcggtgctgtttaaacaacagaaggccagtctgctgattattccaggcatgctgctctcttttaccggtctgtgctgggtgctcggcggtgaagccggactgtcggtagcctcggtcaccgctagcgtgcagaacaatccactgagtttcggtatggcatttgccggtgctattatctggtcgctttactgcattctgacccgccaaaaggccgaaggcaaaaacggcatcacgctgttctttatgctcaccgcgctgacgctgtggggtcaatacgccttaagccccgccagcacgctgcattttaaccttcacgtcatgggcagccttgcgctcgccgccgccgcgctgggatgtggctacgcggcctggaatatcggcatcctgcacggcaacgtgaccgtgctggccaccgcttcatacttcattccccttttctcatcggctctggcggcttttattctcagcaccacgctgacggcttcattttggcagggtgcggcgatggtcagtatcgggtcactcatttgttggcgatcaacgcaaaaaacaaaacaaccggtaatatcgtcctcaggagaaacgatttaagtccgtcgtcgttaataattaacctgcatttaatttacataccgttaacaatgttatcgggaaaattattttgtgtcaggatatgctccaacctaaaaattataaatattgattaataaagaacaaagaaagcgaaatagaaatttaataatttaaaactataccgaactgtacagttttgttattttactcactcccatgacaaactacagaacgacaagacgttgattatcacgttgaggtttttatttaaatctttttaagggaacgtaacaatgccagagactgacaaagagaaccaccaggcaccgacgagtgtcacgctaatgacgatgggtaaacaacggctcgatggcaaggtcgccatggtgacgcacgcaggtcaaggttgtggtaaagagcaggcgattttgctggcttcgctgggggcttcaatcatcgtgacagacgctgacatcgctcaggctgaacacaccgccgaagatattcgtcacgctggcggaaaggcgattgccgtggccgtggatatcaccgttaaatcccaaatcgagatgctggtaaaatatgcttcaggcatttttggagggctggatatcgtggtcaacagtgcaggattcgtctattcggtgagcgaactgggtatcagagatgccgacaatctggaaaaattgctgactgaaaatatcaatgcagccctgtctatcaaccagactcgagtgtctggctggtaatgaggtggcctttatatctcaatgcccggccataacagcagtggcaatccttgtcactgctgttttcattctgtcagcggaaaatcaaagattaatagaccaggcttgggctcttaagagaagctaatccaagattcgccctgaaatcctccccaagatagtcctcatcaatcagctttcttttacgcaattccggcagcaggccgttaagcaagagatcctcctggtcgggctgaccgaggccatggagcgagataacgtcaagcacgccagcgttgaaacgttcctcgatagcatccgccagcgtttcaggcgtacccgccacataccagtgcccggtttcctgtgcctgaataatcagttcccggagcgtgagcccctgtagtgcaaagcgtttaaagatatcggcgcgtcccctgcggcgattgataagccccacttccggcaggaatttaggcgggataggctggtccagcgcaaagtcgcgcagatcgatttccccgcccagcatatcggcgaccttcagcttgccctgctgatagtcgatgcgctcatgtttttcacgcagcctgcgcgaaacgtccgtcgcgctttcgccaatcaccgagtggaaagagttcatgataagcggcttattttcatggcggccgaaggcgttggcgtgctgatgaacgcgttcaacaaaactcacggcgtcattgagcgtaggctgcgaggtgtaaataacctcggcgtatttagccccgagaatcagcccctcgtcggactgccctgcctgaaactgcaccggacgcccctgcggtggcggtggcacgttaagcggaccttcaacctgaaagaaatcgccgcggtggttgatagcatgcagtttacgcgggtcgatgctgatagagccgcttgccgcacgacgcaccgccgccggatcgttggcatcaaacagtgcgctaagcacttcgataaactcggtagcacgggcgtagcgcgtggccggatccggcaggctgatgtcgccaaaattctcctcgccgaccgacgaggtgacggcgttccagcccgccctgccgccgctgacgtggtccagcgtaccaatcaggcgcgccagattatagggtgatgataggtggtcgagacggtggcaatcagtccgatgtccgacgtaacctgactcaacgccgcaagcgccacgataggatcctgactgccagtggtgcccgccagcccgtcagggtctgcctgcaacaagtcggcggtaaagagtccgctaatcttttctttttcggcaatttttgccaaacagacggcgcgttcgatgccagtcttgcgatggtcatcgttagatgccgataccacgctccctgcccctaccagagtcttaagacgcctgcgagtttggttactcaaactgaactcctttttccatcataacaagtcaaaatacggtcgaaagtcagtctaaaaatagagctcacagatttttaagctacgaataaaaaagcattttgtttttacaaaaataataagagaagcgagagaggtttaatctattttttaaaaatggagtttgtagagattacgaggagaaacgcggtcaggattgcactttaaatctattgtttatcaatattctgagggtttaaaacgcatgattaaatgtgggtattcactatgatgatttattgctatggatagctaaattcgttatttcatcttccttttaatttggtttgttatgacctcctgcacacctcaaatcaaaaataaaaaaggaaagaaatatgcactcatctcgccgagttagcgccgtggcgttagggctgtcattagccctgttagcagggagttcttcttcatgggccgcagaaactgcgccggtaaaaggcggtacgctgatttaccttgagcagcaggctcacaccaatctttatcctcctgccggtggattttaccccaacggcggcatactgaatcagataaccgacaaactgacctatcagaatccgcaaacgctgcaaatagagccgtggattgccgagtcatggaccaccaacgccgacaagaccgaatataccttcaagctgcatccgggagtgacattctcagacggtactccgcttgacgctaatgcggtggcgaaaaacttcgacacctatggcctgggtaataaagagcatcacctgccgatttcggaagtgattaataattatgaccacagcgaagtcgtcgacccgcttaccgtcaagttctacttcaaaaagccgtcgccgggattcttacagggaccgcaaccatcggctccgggctggtgtcattgagtacgctggcgcgtgacttcaatgggctcggcgatgcacgccacatcatcggttcaggcccttcgtggtcagcgctgaaacgctagggcgcgaggtcgatttaacggcacgtaaagactacaactggggccctaaaaatctcaaacagcagggccgcgccaaccttgatgccatcaaagtgatcgtcaccggcgaagacagcgtccgcattggtgcactgctggcgggccaggccgacttcattcgtcaggttcaggcctacgacgaaaaacaggccgaggccaagcagtttccaatctatgcgccgtccacccgcggcgttaacgacggcatctcgttccgtccggacaacccgctcgtcgccgacctgcgcgtacgcgaggcgttgctgcacggggtcgacagcaaacagattgtctcgacgctgttctcgccgaactatccgcaggccacctcggtcatcgccgcctcagcggcgggttacgtcaacctgagcgacaagctgaaatatgacccggcgttgtccaaaaagctgctcgacgaggctggctggaagccgggcccgaacggcatccgtgagaaagacggtaagccgctggcgctgactatctatgaatccctgccgcagccgcaaaacaaagaggtcttgcagctggttgcccaacagtggaaccagattggcgtcaagctgaccgtgctggccggtgatgcaggcagccgggtggccgacagtcttgatccgctgaaaacgccggtcaacgtggtagaagtaggccgcgccgatcctgacgttatcaagagtgaattctatcccaccaaccgcgatgccctgctgcagctcggcggcctgagcaataaagtgaaaagctttaaggacgacaagctgaacaaactgttggtggatatctccgcagaaatcgatccacaaaaacgtctggccctggccggcgatgcgcagcgctatctgctggatcaggcctatgagatccctatcttcgaagagccacaggtctttgccggtgcgccttatctgcatgacgtcaccttcgaggccgtggggcgcccaagcttctacagcgcctggttggcgaaacattaataccggagtaaacgatgagccgatatcttagcggacgcattggtcaggccctgttggtgctatgggcagcatttaccctgtcgtttgtgttactgcaaatgctgcccggtgacgccatcttgatcaaattccaggacccgtcgatgggcctcagcccggcgcagattgccgagatgcgtgccgcctacggggcagatatgccgctgtggcagcagtatctgcatacgctcggcagctttctgcacggtgacttcggcttttccatccaggctggcgtgccggtgacggagctgctggtcagcaacttcccacccacgttgcgtctggcggtgcttggcttcctgctggcggtggtgctggcgggagtcattgccttcgcgtccaacctgctgccgctgcgctggctgaagtcggcgctgctcacgctgccctccctgttcatctctattcccaccttctggctggggatagcgctgattcaggtcttttcgttccgactcggatggatcccggtgatcaatccaggcgaatgggttgggcttatcctgccggtgattacgcttgcggtgccaatcagcgctccgctggcgcagattcttatccgcagtatcgacaaggttcaaacacagcctttcgtgtccgtcgcgcgcgctaagggggcaagccgtagccgcgtgctctggctgcacgtgggccgtaacgccactctgcccgccctgaccattgccggtttgctgttcggagaactgattgccggtgctctggtgaccgaaacagtgttcgggttgaacggtatcggacaactgacacagcaggcggtgaacaatcaggatctggcggtattgcaggctatcgtggtgatttctgccaccgcctacgtcactatcaatctgctggtcgacctggtttaccccctgcttgacccgcgtctcaaaacgtctgtcggagtgagctcatgagcagtttgccgataaccaaacacaacggcgacgacagcgcgcagctggcggcattcccgacagcttcacgcgctcgattctctcgtctgcaacccacgctaatcctggcctgggtcgtgatgctggtcgttatcctctgggcaatcgcccctcagctgtttacccagtacagcggcaccgaaggtatcgcaggcgctcagcgtctggctcccggtccggggcactggcttggcaccgatcagctcggacgcgacctttatgcccgtatcgtttatggcgcgtctcattcgctttctggcgcactggtggcggtggttctcggactgatttttggcagcgccctcgggttagctgccgcgtcggtcggcggcgtggccgataccgtcatcatgcgcgtcgttgacgtactgctgtcgatcccgagcctgctgctgtcgctgagcgtgattattctgctcggcttcggcactgtccacgcggcgattgccgtcggggtaacctcggtcgctaactttgcccgactggcgcgttccgaagcggtgctggttcgccagagcgactatgtcgaggcggcctacggcagcggcggaaccttcttctcggtgctatggcgacatattttgcccaactcgttgacgtccgttatcgccttctcggcgctccagtttggtaacgccatcctgtcgatttctaccctgagttttctcggttacggcaccccaccgccgacgccagagtggggattactgatagccgagggccgtaactatatctccaccgcctggtggctcaccaccttccccggcatcgtggtgattctgaccgtgctgtcggcaaaccgcattagccactcattcaggagcaaacgccgatgagttcactcaataacgacaccgcccttcgaccggtgctggaactgaaagacgtctcgattgtttacagcagtgggcagcaggccacgcgtgtcgtcgagcaggtctctttctcgattctgccgggcgaggtcgtcgcactggtcggtgagtctggctccggcaagaccactacggcgcagtcgatcattggcctgctggctgaaaacgggcatatcgagcacggcagcattctgctcaacggcaccgatattagccgctggtcctcgcgccggcttgacagtctgcgcgggtcaagcatcagccttattccgcaggatcccaccagctcgctgaacccggtgaaaaccgtcggcgaacaggtggccgaggtgctaaaaatccaccgccgcatgccgcgcaaggcccgagacgcacgcgtggtggagctgctaactcgcgtggggctgacgcaccccgagcagcgggcgaaacagtatccgcatcagctttcgggcggtatgaagcagcgcgtattgattgctatcgcgattgcgttacagcctgcgctgattattgccgatgaacccaccagcgcgctggatgtgcgggtgcagaaacgcattctggacctgattgacgcgctgcgcctggagtttgggaccgccgtgctgtttgtcactcacgacctggcgctggcggcagagcgtgccgatcgcctgctggttttccgtaaaggtcaggtacaggaacagggcattaccgccgaggtactgcgcgcgccgaagagcgaatatacccgtcagctgttcaatgacgccccgcgttaaccccgcgccctctctctgcgctggcgcacagtgcaaagcatgccgatagcgcgatcgtggtgcgtaacgtcagcaaacacttctcgctgggtggtaaaaatacctcggccttcaaggcgttggatgatgtctcgttcgaggtaacgcgcggcacgacgcattcactggttggtgagtcgggttcaggcaagaccacgctggcacgattgttgctgggttttcaacgacccgacagcggccaattgtttatcgacggcgtagacatcacgcagttatccggcgaggcgttacgtcaggcgcgcaggaaaatccagttagtgtatcagaaccctttcgcgtcgctcgacccgtcgcagacgctgttcaaggttatcgaagaaccgctgctaaacttttttaagctcagcgccgaccagcgccgggcaaaggtgcacgagatagcggaacgcgtggcgctgccgctgaatctgctgcaacgcaaaccgcacgagctctcgggcgggcaacgtcaacgcgtggccctggcccgtgcgctgatactcgagccgcaggtgctggttctggacgaagcaacgtccgcactcgacgtcaccgttcaggcgcaaatcttgcgtctactggtgcagctccagcaggagctgggcctgacgtatctctttatctctcacgatctggccatcgtgcgccagatttcgcacagcgtgtcggttctgaatcagggcaaacaggttgattacggcgacgtcgaatctctgttcacccaaccgacccacgcctacacccgtgaactgctcagcgccattccgggtatttcgcatttgcgcgtcgcacagccgacgccaaccaaggagtttgtatgagccaagcggcctctgacagcagtcataaacgactcggattcttcacccgtctgttagacgacaccagcccgcaggagcgctatcgtctggcagcagagcaaatcgcccatgccgaacagctgggatttgattccgcctggatagcgcagcaccattttcatcgggatgaaggcggcctgcccgctccgctggtttttttagcctacgtcgcggccaacacacgccacattcgcctcggtaccggggttattacgctggcaatggagaatgcgctgcgcgtggcagaagacgccgcggtgctggatttactcgccggtggccgtctggagattgggctgggttcgggcggtaccgcatcatcatttatcccttcggcctaacgctcgacacgcgcggcgaagcctttgcgcagaatctgcaaaccctgcgtgatgcctggcagggtaaggcgctcaagggagaagggaatcagctctatccgcctgcccccagctgaaccgtcggctgtggcaggccacgttctcgccggaaggcggtgcgagggccggtgcggcaggcgatggcctgatgctttcccgcactcaaccgcgccctgaagggcagcccgagttaccgctggacgtgctgcaaaacagaataatcgacgcctatcttgaggcgctgcccgcgggcgttgagccgcgcattctcggctcacggaccgccttcgtcagcgacgacgccgaggaggcaagaaggctggccgaaaaagggctgcgtcgtcaggcctataacttccagcttgccggtcataaaacccggggggactcgcttgacgattatatcgccgccttcgacgtgcatctcggcaccgccgaacaggttattacctccctaaaacgcgataccgcgctggcgagggtgaccgatttggcgtttcaggtgcattccatcgatccgcctcacccttacattttgcgttctatcgagctgatcgccaaaaaagtggcaccggccctcggctgggtgcgacagaccccgaaaagcatcgctaaacctcagcctcttcatttcgaactttcaaaggaaacactatgaccgttgctcaagaacaagcgaccgatctgctggcaacgctggcagaaatcgaatcgggttccacgctggcgcaggcgcgcgaaacccgtgaagccgcaacagcacacatccagggaagctacaacgcgctgtttaacagcaacgaacttatcgccgaatttccgctcgccgaccgtctggccattgcccagcagatcgcccgctggcacgctgatatccagctcggcgcacactatgccgaacgcctgcacgccttgcaggctgaatcgccttcacgcagcaggcttcagtcggcgctggcgcacgccgaacgcctgaccttcaagcctgctaatgccaccgccgagcatttgcaacagctcgaagccgcaggttggacgcctgacgccatcgtcaccctgtctcagttggtggccttcgtcagtttccagagccgtttactgcgcggttatcgtctgattaacggcaagtcgacgctggataacggcaccgccaccgtaggcgccgctttctggaataccgagccgaaaacttattccggccagcctgcgccgaccgcctttactcaggccgagctgggttgggagccgtggattgcctcaaaaccgctgcaagacttcaccgccgagcagcaggaaattctggcgcgcttcggccacaccgactccgactacttccgcctgctcggccgcaacctgccagtgctggaacagcgtacgctgaccgacaaaggtattttcttcacctccggagggctgccgcgtaaagaccgcgaactcgccgccgccgtcgccagtaagataaacggctgcatctactgtgcctcggtgcacgcacgtaaggcggcgcagctgtcgaaggatcctgacgcggttcagcgcctgctcgatacctctccgggggatattttgagtgtcggacaggacgcaagatggcaggcagaaattgactttgccgccgcgttgtctgccacccggctaccgccaacgagaaacaaattcagtctttgcgtgatttgggactcagcgacctcgagttgcttgacctcgtgcagtccaccgcgttcttcgcctgggccaaccgtctgatgctgacgctcggcgaaccctttgaatattaagcagtaaagtcaatgaaatcgagaaggtaatcaggtcgttattgaataagaaatacagggttttttcattattttgatggagttggatatgactataacaaaaaaacagtggcaaaaaacgacgctcgccaagtgggttgccacggcggcactggtgatgtcagcagtgcaagcgtttaccgcaaatgcggccgaaacgccggttcaaggcggtacgttaaacgttgcattgggcagcgatacgccgattattgacccgtcgattaccggacagtcggtcaccgcactgattgaccgtaacgtggttgattccctcgtcggacaggctgaggataaccacttcaccccgtggctggcatcaagctgggaggtgaatgaaaaccataccgattacgtgttccacctgcgaaaagacgtgaccttcagcgacggcacccggctcgacgccgccgcggtgaaatttaaccttgagcgcattctcgatcccaaaaccacctcaagctattccaagtcgctgcttgggcctgtcaaaacgatttcgaccccggacgactataccgtcgctatccactatgactcgccgtttgccccgttactgcaagggttaagcctgccgtatctgggtattcagtcaccgacctatttgaaaaacaccccgaacaccagcaacacagtcgtgggttccggtccgtttattcttaagtccttcgtcaaaggcagcggcagccagctgacacgtcgcgccgactatcactgggggccaggctatgcgacacacacgggtccagcctaccttgaagcgattaacttcaaatatttgccggagtcttcagtgcgtttaggcgcgttgaccagcggtcagattcaggccattgacgcggtaccgccggtcaacgccaagtcggtgaaaaacaatccggcgctcgaggtcaagaccaaagagaacccaggggtgagtgaggtgttatatctgaacacctcacgcggtccgttcaccgacgtgaaggttcgccaggccttccagagcgcaaccgatcccgcttcggcggtaaaagtggcgttcttcggcaccctgaaacctgccgataacgtactgggcccgcagacacagtattacgacccttcggtcgcaaaactgctgaagtatgacctcgccaaggccaacaagctgctcgacgaagccggttggacccaaaagaacagcgacggtattcgtaccaaagacggcaaaacgttgaccgtagacttcgtttatgacccgacgactatccagagttccgacgtgacgctgttccaggcaattcagttccaggtgaagaaagccgggttccttctcaagttggacccggtcgattccggtgcctttaccgaccgcaccaacaataatcagtatgacgtggtgaataactactacgtacgcgccgagccggacatcctgcgtaccgtgttcttgtcgagctatgcgccaccgaaaggggccaactacagcgtcgtgaaatcgctcgacgccaagctgctcgaggcggtaggcgcaccggacgcgaaacgtcagcagctctattccgacattcagcatgaaattatcgagcaggcctacgtggtgccgttgtacgttccggcctatcagttgggcatttccaaaaaggtacacggcgtaagctgggcgaccaacgccaagccaaacttctatgatgtctggttgagccattaatatgatttggactgcaatacaacgtcttttcactatcctggccgtgctatggggcgcggccaccctcacctttatcgccctgaagctgattccgggcgatccggtgtccattctcagcggcggtactagcgtggtggacgatgcctttcgcgcccagcttacccatgagtttgggctggaccagccgctgtggttgcagtatctgcactactgcggccatgcgctgttgggtaattttggtcagagctatcagtatcgcgaaccggtcatcgaggtcattctctcggcgttgaagcaaacgtcggtgctggccgcgctggcactgctgctcgcattggcgttggctatcctcaatgcgttggctaccgccggtcgctggcgcttccttagagcgtgcttctccgggcttgagctttgcctgctcagcacaccggtctattggctaggcatcatcctgctcagcctgttcagttttcagatgcactggttcccggtgatgggtaacgatggctggcgctcgctggtgctgcctgtgattaccctgagcctgccgctggcggcgattctgagtcaaattctgcgcgacggtctggaggaggcgctgtcgcagcccttcgcgttgacggtgcgtgcacgcggtgccggtgaaacccgcctgcgtctgcgccacggcctgcgccacgccgccctggcggcctccacgttgaccggcaccatgctggcgagcgtgctgagcgggtctattcttactgaaacggtctttggccgcgcgggtatcggcaaaatcaccctacaggcaatagccagccgcgatatgcctctggtgctgggcatcgtgatgctctctgccctgctgttcgttatcattaatctgttggtcgatgccgcctatctgctggtcgatccgcgcctgcgtaaaaggaccccttgaccatgagcagcgatcctttgctaattccctcacgccagaacactttggcgcgcagcaccagtccgtggctgttgcccaaaacgctcattcctgcggccttcgtcctgctgctgattttcaccgttattgcgccgcagtggttcacgcccctcaaaccggatgacatggacatggacgcggtgctcgccgccccaacgctgcaccactggtttggaaccgattcactgggccgcgacgtattttcccgcgtggtttacggctccgcgctgtcgttgagcatcggcctcggcgcaacgcttatcgcctgcctcggcggcatggcgctcggtttactgacggcgctggcaccgctggctctgcggcgcgtgctggtgcgggtactcgatattctgctcgcctttcccgagctgctgctggcactgctggtgattgccgtgctggggcgcggaccaaccaacacgctgattgccgtcgggctctcgggcatcgccagctatgcgcgtctgttacgctctcaggtgttgcaggtcaaactttccggctatgtcgagcacgccgtggcgctcggcgaaccgccgctgagcattatctttcgacacattctgcccaacacgctgcgcccgctgcttattctcgccaccatcggcgtgggccagtcggtgctgaccgcgtcgtcgctgagcttcctcggtctgggcgttattccgcctaccgccgaatggggcgcgctgctggccgatggccgtgactatctcgacgtcgcgccgtggataagcctgttgcccgccaccgtggtggccgtctcggtgattgctatcaccctgctgggtcgtcgtttgcaaactattctggcaaaaggggcctaatccatgaccctcaatcaaaatgcggccgccccgctcctcgtcgttgaagatctacaggttgattttcttcagccgcagggcaccgtacaggcggtaaaaaatatctcgtttcaggttcgacccggcgaaattgtcgcactggtcggcgagtcgggttcaggtaagtcggtgaccgcccgaacactggtcggactggccggcgataatgccagggtcaacgcccgtaccctgaccttaatcacccacgacggcacggccaaaaacttgctgaaacaaagcgccgcagactggcaaaagctgcgcggccgcgagattggcttcgtcttgcaggacgcactggtctcgcttgatccgctgcgcaccctcggcaaggaaatcgccgaacccatgcttatccatcggttgtacccgcgtcgtgcgatacccgcacaggtagaagcgctgctgcatcaggtcggtatacccgacccgcatcaccgtattgatcagtatccccaccaactttccggcggactgcgccagcgcgcgctgatcgcctcggccctcgcaggcggcccgaaactgttgatcgccgacgaaccgacgacggcgctcgacgtcaccgttcagcaacgtattttggcggtatttcgcaagctggcgcaggccggtcacggcgtgttgctgataacccacgacctctcggtggtcgcgcaggtcgccgaccgcgtggtggtcatgcagcagggtgaaggcgtggagagcggcaatgcgaagcaggtactggccgcgccgtcgcatccttatacgcgacggcttctagccgctattcccgggcagacacgcggggacgttggctttcgggagagccgccgctgccggatgcgccgctcaccgcgcaagagaacgaaaaccagcagcgccgcgagcagaatgtcgcagcgctggacgtgcgcgacgtctcggtcgatttcagtcgccccgacggcgtcaaacacaatgcggtcaatcaggtctcactccagctggcgtgggagagacgctcgggctggtcggcgagtcaggctcgggtaagaccacgctggggaaagtggtgcttgcacttcagtcggcacatcgcggtgaagtatggctggcaggaaaaccctggagccagctgcgtgagtcggaacgtcggcccttgcgcgggcgcattcaaaccattacgcaggacccattaggctccttcgacccacagtatacggtcgagcagattattcaccagccgttgaagctacgcggaaaactttcggcgcttgacttgcgtttaaaaacgctggaattactgaaactcgtcgggctgcatcctgaactgctggaacgtcgcccacaggccttgtcgggcggacagcgtcagcgggtgtcaatcgcccaggcgctggcgtccgatccggaaattctggtctgcgacgagccggtttcggcgctcgatgtcaccacgcaggctcaggttctggacctgctcaccgcgcttcagcgcaagctcggacttgccatgctgtttatctcccatgatttgggcgtagtcgaacacatgagtcatcggattgcggtaatgaaagacggcaagatagtggaaagtggcactaccgagcagattatccgctcgccgcagcatgcctatacgcaaaccctgctcgccagcgtgcctgccgcatcagtctgataaaactatcgccccctggcgtgcaacgcgttgggggcgataggttactgccgggtaaaaccctttttggcttttagcttttagccgcgctcactggcagcacagacccgtggtatttctgaataataaactcggccacctgcggtgattccaagtctttcgccagacgcaaaatacgggatcctgcgccagtttctgcgtggtgaccacgatattggcatacggatttccttgcgctttttccagccccagcgcatctttcgccggatccagcccggcttccagcgcgtagttaccgttaataatcgccagatccacgtccggtaaggcgcgtggaatttgcggcgattcaacctctacgattttaagatgcttaggattgctaatgatgtcctgcggcgttgccagcgttttcagatctggcttcagcttgatgaggccctggtcctgcaacagatagaggccacgactgagattggtctcgttgtttggaatagccaccttggcgttatccggtacctggtcgtagtgcttatacttgctggagtatattcccagcggctcgatatggacctcggctgccaccgcaaacttcacgcccaacgccttttcctgcgttaacagataagggcgatgctggaaatagttggcgtctacgtcaccatgctccagcagttcattggagtttactccttccggtatctcgatgaccttgagattcaggcccgggtcgatcttcttcacgtagtcgaggatctcggcgtggggtaccggatcggcggccacgcgcagcggctcggcagcataggcagaaactgaagccatcagcgccgcgagggcggtcaaacggcctgcggaagcggcggaaagtccgagacgaaaagcgaatttattgagcatattttatccctgtatcggtattgttattttttgaaaaacagtaaattaaagcgttaaggtggcttcatcgaaggacaaacgcggcaaacgttcgaacagtttggccggatcgccgtagccaatattgaccaggaaattcactttccagcccttttcactcaggaagcgtttttcaacctcggcggcgtcaaaacccgacattgggccggtgtccaatcccagcgagcgcagggcaatgatgaaataggccgcctgtaaagacccatttctgaaggcggtttcattggctaatgcctcgcttgaggtaaaccaactgcgcgcatcggcgtgcggaaacagcttgggcagttggtcatagaatttgggatcgtgggcaataatggccgtcaccggcgcgctggcggttttcagcttgttgccgtcggaaaccgcctcgaccagccgatccttcgccgctttgccgctgataaacaccacacgcagcggactggcgttggccgaggttgggccccatttagcaatgtcccacgcctgtttcagcaattcagggctgaccggtttgtcctgccagccgttatgggtccgcgcctcggtaaacagctgcgccaaaacttcttgggttaaaatgtcagacatatcttgctccacatcaggttagggtttaacaagccgctgccgcttggccttcttcagcctttttccggcaacgtgcgccagcgcggcgcaaatcaggtaatacaccagtccgacaaacaggaagatctctgccgggtaaatctgcacgcggttatttacctgcgcggcaatcgtcgtcaactcaggcacgttgacgataaacgccagcgaagtatccttaatcagcgagataaacaggccaatataggaaggcaacaggttgggccacgcctgcggcagcaggataaagccaagaatttttagcggactcatcccagaggcaattcccgcctcttgctgtccgttggcagtgactcgagaccggcgagggttgaatgcatcaccgccgctgaggtaaaccacgccaacgcaagcaccacggtcagtggccccggaattgagccgccaaaaacgaccggcagtaaaaaatagagccagaaaataacgaagatcagtgggataccgcgaatgaacgacgcccagaggaacagaacgtgtcgcgtccagccgccgaaacgccacgctaacccggccatcagtacgcctaaaaccaaggccagaacacccgccgaaagcgccataatcagcgttagcaacaccccgcccggctgcccgtcggcgacgcgcccccacagcatataagtaaaattatcgtgcaggaccgagtaatcaaactccatgatgcccctccgccgacgcttcctgcgttaaccccgcaatccgaggctgttgacgctttttagccgggcgcttcggccctagccaggtcaataatcccccagaatcaggccgagcagcagatacagtccggtgcccacggcaaagccttcaaaggcgtgcgcgttatagctttcaatctggctaacttgataggtcagctccgaaaaaccgatgccggtggcgagtgatgaaagcttcatcagattgagatactggccggcgattggctgccaggcgttagtcacggcctgaggcaacagcacgcttcgcagccgctgccagtcgctaaatccttgtgaaattgcggcttcgctttgccctttaggaatcgcattgaggcccgactgcacctcttcgagcagaaaggcagcggtaaacaacgtcagtccccacgccgcacagagaaactccggtgtcagccacgccacgttacccggcagcgtcgcccacggatgattgtcgccgatgtaaaaacgccaacgctgcggcaatgcaccgtaggcggcgaaataccagaaaaacagctgaaccagcagcggcgtattacgaaatatcgagacataggcggcgacaaatgcccgccccacccgctggccgccgagtctcagagccagcaataacacgaccagaccacttgccaggaggctgctcaccacgctgacgtaaagcgtggtcagaaagcctgagataatccactgcaacggctggccggttagcaccccggcccagtctggatgccagctcattgcgcgggcccttcttccgggtgcagcgggaacagcactttctgcagaaaccgctgcgcccgcgggtgggcgggccgggtgaagaaggcttcaggctcggcctcttcaagtatttcgccgccgtccataaacaccactctgtcggcgatttcgcgtgcaaaactcatctcgtgggtcaccactatcatggttatcccactctgtgccagctcacgcattaccagcaacacctccccgatcatctcagggtcgagcgctgacgtcggctcatcgaaaaggataatggagggatcggtgaccagtgcacgcgcaatggccacccgctgctgctggcctcccgaaagctgctcggggtaatgcagcgcgcggtctttcaatcctacgcgttcgagcaaggtctgcgccttcttgcgcgcgtcctctcgcttccagccgtgcactttaatgagcgcaaggctgacattgtcctgcgccgtgaggtgggagtagaggttaaactgctgaaatacaaagccaatatgagtacgtaactgtcgcagcgcggcgccgttcaagcgcgaggtaggctgctggttaatgaaaatttcgccttcgcttagcgtctcaagatgattgatcaaccgaattaaggtcgatttacccgagccagatggaccgcataccgcaatcacttcgccgctcgacacactcagattgacctgttttatcacctgatgagggccaaaggatttgctgacccggcggaattccaccgccgtttggtttttcaccgctgaacgtgaaaaaaccgcagacgtcgctgcggtagagagagagtcttgctgcatcgcaggtacccgccgattatttcgcttcgattttgaacagtcgcggctgcggggatttcgtctgcgggccaaaccatgtgttgtagatactgaccgcctgaccgtttttctcgagggtcagcagctcgtcattgaccgctttcaacaggttgctttcgccttttttgacaccgacaccaatctcttctttgctcaacagttctggcaacaccttatatttcgccttgtccggcgcgccgtcgagcaagcccgccaagatagtgctgtcctgggtgatagcctgaacgttgccgttgcgtaacgccgataacgccagcggaatgtcgtcataagacagcacgcgtgactgcgggaaacggtgatgaagttcctgctcgccggtcgtaccttttaccgcaccgatgcgagcggtcgcgtaggcgtccagtttgtccggtgaacccaccggcaccaggaactgctgaccggtcacaaaatagggaacggagaaatcgaccacctgcgcgcgctcaggtgtgatggtaatgtcggcaacgatcaggtcagccttacccgattgcagaagaggaatgcggtttgccgggttggtcggcaccagctgcagtttgacccccaggccttcgccagcgccttggcaaaatcgacgtcgtagcccacgatgtcgtgagtttttgcgtcaacggaaccgaacggcgggtttgagtcgaaggtcgccactctgaccacgccggctttcttgatatcggccagttggtccgcatgagcggccacggcggtaacgctgctgagtaccagaagtccccatgcggaaagattgccacggcgcaaaatagatttcttcattcctgttccttatgcaaaagcctgagcttcaaccctatatccggtcataaaccagagtgtcttttcttatattgctcagagaattacacaagcccgtaaacggcactaccaagaaaaaatgctaagaattacaggaaaatgcataacgggacggagaaattactgctaactttttggcaatacttacagaggaatttattatgacaacacacctttcacgcccggtcgccgtagtgaccggcggcaccagcggcatcggattggcggtagtgaatgacctggcaaaagatcatcaggtttatgcattgggccgcaacaaggacagcctggttgcgctgcgtctgttgcaaaacgtcgaggcggtcgagattgacctgctcgacttcgaggcgcagcaaaaactcatccactcactgccgcagataaacgtgctggttcatgcggctgccgtttccgaacaaactaccgttgagaacgccacgccagacgtctggcaaaaacagttttccatcaacctttttgcgcccgccgagctgactcgactcgccctcccgcactgcgcgaacaaaacggtcaggtggtgtttatcaactcggggtcaggcacgctggcactgccgggacatacggtctattcggccagcaagtttgccctcaatgccctcgcacacgccctgcgtggagaagaaagcgaaaacggcgtgcgggtcgctacggtatctcccggccccacggatacgccaatgaacagaaagagccgcgaacgtgccggtaattttgcagaaattgatccgctggaatacagcacgcctgagtcggttgcccatgcggtgcggctggtggtttccgccagtgaagacacacagataaccgacgttaatgttcgcccgcgccacgacaaggcaaagcgctagtttccccttcctcgttcttaagccggcaatcctcctgctgaatggctaaaaatgcgttgccaggcttctgtctttagagaaaaacgtaggcaaaattattctatctctatgatctctaaggaactattacgccacaagaggtggcccgtttccatgcagaattcggaccgcccttttatctgtgcattatctttttatcatcggtttctcaaccagaaaccaggataatgacgccagtacgaaagtaattaataaagataaaatcattgaggcgtaaaaagggatgcccatttcattaataactatctgctgcacaggaaatgcataaatatagataccgaatgaaaagtcaaaccttccctttatcaattgatctttaattgagaccccgatcacaattgtcattacacaaatggctatcggccctaacacattggtgagaagcccgccgcaggaagcgaaatagataaccaacaggcctgctgtcagcatcaggacttttagatgaagattgttaatccacctgtccctattaatatataacagtgctccaacacaaaaaggcacagtgaataaacttgtccctattatcgccaggtgggtaatgcctttcttaacacaaattacctgtataattgccgataaaataagcggaataaaagccgccagattcttatttttgaaaacggtcaaaaataacgcaatcacgatgtaatcgaacacttcaaaaaacaaggtccatagacttccgttcatggtattactgagtaaataacccgaggtaaagtcattgatatcactgggcatgacgccaacaacgccaaccccgttatgaccataaccctaatgaacgtcttaacaggttccagagagagtgcccattccgcccacccagctttaccaaaaagaccgcaacataaatataaggtaaatatcaggcaaacggccaggcctggataaatccttaaaaatctttttttagcgtattcaaaattagattttcgcctttcataactttgcgtaattaaatagccagatattgaaaaaaatataaagacagcaagagaacctaaagttcccgagcctaaaaaagtcggctcgtcctgaccacttaatgcaaaatgatgactgtaaataaccatgattgcagcgaggtgtcggataatatcgaaacagttgttatgggcgggtccctgttttgtttgcataaatctccgttaaatcagcttaaccaaaagcctagagatttagcctccatatcgtaagcttttggtaaagaaatcgtaaagcgctatcctaagccacttttaaaatacttcaagcggccagagtgaatagaggctaaaaaaattgatttttcagaaaaattgacccaatttataatgagaaatctttactattaagcgctatagggttcaaagttgacggctaagaaattggtgcactgcccggttaaatgcgcccccagcggtgcaacctgcatttcatcgaattgataagcgctggagtgccctgtatacagctcttctcgtcaaaatgtccatttcgagataatgaaagtcgagtcctcggcataaagccaaaaagttaagccttaatctagacgcattctcattaaagagcgtgtctcatgataagtaccaaaaggctgaataccctataagcttgatgataatggggttaaaaaaatagactgatatcattttaggttgaaaggaacagccagcgaaaggtaacggctggggcaactcggccccagctcgcgaattttaaccttcagtaatgatgtgtgcagcacagataaccgacaggtggcttagcccctgcggcaggttgccgtagcattttttagtccgtacatcatacatttcgctcatgataccggcatttttgccaccgccgaggatctccagaagcgattgcaagttctcttctgcttccttctgatggccaagcaccgccagcgatgacgccagccagaagccgcaggcgataaaggtattctcctccttctcaacgccggaatagcgataaagcaggtttccgtcggtgccgagttcctgctgaatcgccctcaacgtgctgagcattctcttcggcgaaacctctttgccgtactggtgcataaggccgacggcggcgtcgagatcgttgctaccggcccagaaggtatagctctgccgttcctctgaccagcagttctcttctatccagtctcgtatcctgtcgcgctcgcgctcccagcgcccaacccacgtcggctcgatgtgctcgcccttagccagatgcaccgcctgatgaagagcaagccaggaggccattttcgagtgggtgtaatggtgcgactcctgcaattcccagatgcccgaatcctcctgacgccaggtgtcggcacaaaggttggccatctgaccgagcagccgagaggttttgagatccagcacgtgccctgcctgggtaaacagcaccgcagtatccaggacgtcgccatagttgctgagctgtagctggctggcggcattattgccgtggcgtaccggctgctcaccgcgatatccctgaaccgggatcatcacctcttccgggaccggctcgccgttcagcgtaaaacaggtatgcatctcacagccgctgtcgtacagcgcgtctgtgagccaggagaaggctgcctgacagtcgtcgagcgcgccgatatagaggaacgagcgaataatcatgcaggcgtcgcgcacccaggcgtaacgatagtcatagtttttaccgctgcccttgccctccggcaggctggtcgtcgccgccgccgcgagcgcaccggtgggcgagtgccacagaaacttcaaggccagcgcagaacgaataacctggggcttatatttccctttgtagtcaagagaatccacccagtcacgccaggcgatatcgctggtctcaatatgcttgtcgattcgtttgagcgaaggtaccgccaagggtttattttcggtcaccagcagcgcagccagcgttcgttcaccggcctttaccggaaatgtcgcctctgcaccatcgtctgcgcatgaggaaaacttgatattttcctgagtacgcagcatcagcagcaggttacccacgtgccaggccgtgccctctggcgtttcatgttgccacggcgtgcgggtgtcagatgcggtaccgatacgcagcgtcaacgccatcgaaaccgtgccttcgagcccctcgatacgtcgagcgaactcgttccacggcagacacccggccagcgtgctgttgatagactcggtgaccttgacccgtcctttcgccgtttcgtatagcgtttcaagcacgttgctattctcgcgatactgacgggtcatgcggtaaggctctgcgggaagcaactgaaaatatccccctctttcggcgtcgagcagtcggtcaaataagggaggtgagtccagatccggcacacaccaccagtcggcagagccgtcgggagacagcagcgataccgttctgccttcgcctacggcggcatagtcgccgatatcacaaaatccctcttcgtcgcgaaattcccaggataatcttgattcttcaaacggttttccctctgcctttcagccagtcatgcaacagctggctctgcgttaaacaaatagggaaaccctttccctccgttatttaagcctagcagctgagtgaaaatttactgcaagcagcaaagagccgcccataaaggcggctcgcggtatggctgaaattgaaagaatttagtcctgaacggagacgccttcctcggcctgagcggcaaccttcgcctggctcttgttgcttgaatagatgaagtacagcgcgatagccagacagactacggctcccagacgcgtggccgaaaagtgaatggtctgattcccagccagccgaagttgtcgataagcatgctcatcgccaactgaccgaaaataacggccaccgttgccactgccgcgccaatacgctgcacggcaagcaccataataacgatataagggacgccgcaaagcgcgcccatcagctgccatttcggcacgtccagcagagtgaccgcatgtttaggttcaaagaaaaagatcagtaaggcggtcaccagtgcaccaagagagaaagtcagaaacgcacagcgaaacacgccgactttactgcccagctgaccgtttaccgccgcctgaatgctcaggaatgcaccaccggcaaccgccagcaaaataaatagaaacgtcattttttcaccttaacctttagccacgaggaccagtgcggcaataataaatatcagcgcgatgatacgtttgttgtcgatttttcggtgcgcggtgccaaacagcccgtagtggtcgatgatcaggcttttaaagacctgccccgcgagaataccgatcatggtcagtgcaataccaatgctcggtacagcaacggtcaggataaccacatacatcggccccaaaataccgccaatcagctgccaaccgggttgagcaaaaaacgagggactgttgcgcgggctgaaaaacagcatcaacagaaacgtcagcgcggcaccgacgccgaaaatactgaaagtggcccataaatcaccaacttctcccccaatggccccagtaaaccggcctcaacggataacccatcccgccaacgacgacgagcaatattaataaaagctgcataaaacagtctccagtgatgtaggcgacgatcatatagcagcggttgatggcgaaaaacggtataatccaagaaacacttttgcagggaatgagataatgtacgacccgagcgcgattaatttcagaacactgctgttctttattggcgtctttgatgcacaaagtttttcagtagtggcgcggcgtgaaggggtatcggcctcaatggtgtcacgggtgattcatcagttagaagacacgctcgggcagcagctgttctatcgcaacacgcgcgcggtaatccccaccgaagcgggtcgtttgttcgtggagtatgcacgcaccatgaccgagcagcttaatgaagcgcgccgcgagttgctcgatcgagcgcttgaaccggcaggcctggtcagaatcaatgcgccggtattttttggacagcgccacatcgcgccctggttgaccgaattatcgagccgctacccccggttatcgattgagctaacgcaaaccgacgattatatcgatccccatcgtgacgccacggacgttttgttcaggattggcacgctgacggactcctcgtttcacgcccgcgtatttggcactcagcgttaccatctggcagcgtctcccgcctaccttagccagtttggaaaaccggctacgcccgccgagttcagccagcataagtgtctggtgtacagcggttcgaccggccctaaccgctggctgtttcgaaagccagaagacgactggactcactaccccatttcggcggtgctgacctccaacaacgccgagtcgctgctcaccgccgcgctcgacgggatggggctggtgctgttccccgactggctgatcggtgacagcatcaagaaaggcgagcttatcaggctattgacggactatgaggcggcgataaaaaccgaacctcagcacatcgctgccatttaccccaatacacgccatcccccactcaacgtcagaacggtgattgactactttgtcgaggtctacggtacgccgctttactggcagtttgattgagcgggtagcctgcccgggggtaatccgccaaagtgatcggtctgacggccccttcaacggtattaaacagagttttttacttactgcgtatgtcttcgaatacgtcgagcaggccgagaaagcaacgcataagcagcagattgccctgtgctgttcacgaaatctgacgcatcgccgggtgattgacctttgagccttaacgggccggtgaaaaccccttaaatatcgttgaatacaatgcccaattcacggcgtacttcatcgagcgtttgcagcgtgagcaatgagtcagccagtgggcgaatcggcgactcagtcagcccatccgcaacacaaaaggccagatgcgccgcctgatgatagagttggtcgtaagaaaaacgcggctcttcatagctgattttctgcttatcgttgttgaaaatgtggaagtttcccggcgcatagaacatgccttcgagaaaaatatagccttcggtaccggcgatcaccgcagtaccgggcgtatggctaaacagcgtggtgtgaagagaggactggttgccgttcttatgtttgaggacgatagacgcctgcccattaaccccagtcgttgcggtctgtccagacgccagcacctgctccggcgcacccagaaatttggtcgccagcgcaaccggatacgagccgaggtccatcagcgttccgcccgccagttcaggacgcataatgcggtggctctgctcaaaatattcaccgtgatcggcaataatggtacgaatctcaccaatcgcgccctgatcaatcacctgctgtagcacatcaaactttggcagaaacgcggtccacatcgcctccatcaaaaagaccttatgctctcgcgccgcctcctgtaatccccgcacctgctcggcatttatcgccagcggcttttcgaccagcacatgtttaccggcctgaatcgccttgagcgcgcaggcataatgcgttgggtgaggcgttgccacgtagaccacgtccacgttgttatccctgaccagctcgtcgatggagccgtaggcatggggaattgaaaactgctggccaaaggcccgtgccttagataacgcactaccggccacggcgtaggcaatctggcgggtatttttttgcagcgctgcaacgaaacgctgcgccacccagcccggtccgacgattccccaacgtaacgccggcgcgctgcgcccttccggggttctggcggcggcagtgtgtaatgaaatttcatcgttgttccttttattgatctctcgaaaattacaaatactcgggtccgtattgtgaagatattcaacaaccgcgtgcagggctagcgagaatttgatgcgaaacaatcaaaaattccatttatataaaattgaaacttttattctaaaagattagcatggtagcgattaaatggccatttcgagctttgtaccccattacttctaaacataatcataaagagacaaggagtacccgatgcaaaaagccctacacggaatctcaacccattattgcaacattgtgaccgacgctcgaattgccaaagagaccggttacgacagccttgaactgctcagcagtaagctggtgcgttatctcgataacggcggcaccacgcaaaaactcaagaagatatctgacagttatggcctgtcggtcggctgcgttaatgcgttgctggaaatcgaacgttatcagggcgaggccaagcagaccatgctcaaggaggcgacccgactgactcgtgcggcagccgagctcgagtgcccgacggtgcagattctggcgctggacggcattgacgataaacccgatgaaacggtgatggacatcatcactgagaacgtcgatgccattgccaaaattggccaggagtacggcgttcgctatcagattgaggtcattgctttcaccaaattccgcactcttgaacaagggcttgaggtcattcgtcgcgttggccgcgataacgtcggtatggtcatcgacttctggcatctttatgcctccggatccaagcctgaagatatcgcgcgtcttgataaaaacctgatctacggcgtccatttctgcgacggccgcctgcctaaacccggcgaagcctgggaccagatggtgctgcgcaattacatgccgggcgaaggtgaaattgatattcaggcctggactgatgcagtgaaagcgaccggatatgacgggctatggtcggccgagctgtttagcccaaaccgctgggaatatgacctgtatgagattgcgacggaatgccgcgagaacatgacccgctataccggctaagccaggttcgttcaacgatatcaggttaaatcggcaggaacatttcatcgatgacccagattgcccaacgtggcgtaatctgggtcatcgactttagaggcttatttcatctgcagctgcggttgcagtttcagcagttgacgagtcttgcttgcctcgctggcaggcacagccgacgccgcattgccccatgagttgcgaatataggtcgccactgccgcggtctgctcgtcagacagtttccacgcaaaacttggcattgcaccgctggttggattgccctcggtcactgcgccacgaccgccctgcaagacagtggtcaagatagacgaggcgtcaggcgacatgatggccgggttattggccagtcccgccgcaagatgcgatatgccttgcccattgctgttgtgacaggccgaacagttggcctcatacacattagcaccgatcttcatctgcgcattatccgccgccagtggggtcggttttttgttgtccgaacccggctgagccttgatatagctggcgatggcgtgcaagtcggcgtcagtcaggtgctgggtggagttggtcacggcctcggccattgggcccgatgccacagcaacatggttgctgcccaatttcagatactgcaccacctgatcttccgaccagttaccaataccggtatacgtattgctggtgatctctggcgcataccactcgccgagattgctgccctgcaaataagctccggtatccccgccgatgatatttttcggcgtatgacaggccgcacagtgctcaagaccttcgaccaaatacgcaccgcgattgtactcggccgacttcgacatatccggcttgaagccttcgtttttgaagaacagcagattccagcccatcatcgccatgcggatgttgtacgggaacggcagttgggtttccggcaccttgttgtttaccggtttcaccgaacgcatatacatccacaggtcgtgcatatcctcatcgctgaccttgacgtaggcattataaggcattgccggataaagattttctccgtcgatacccttgccgtgtctcacggcacggtaaaactcgcgctcggtccagttaccgataccggtctctgcgtccggagtaatgttgctggcaaaaatgccgccaaacggtgtgcttattgaatagccgcccgcaaaggcctctttgctgccaggcgcggtatgacaggccacacagtcgccggcgaccgcgacataacggccacggctaatcgcggctgcatcggcagcggttaacggctgcttcatctgggtcttgttgtcggcgacgttgtccgccgccgtgctgccattttgatacagtaaaacgcccgccacaacggcggcgatgacgacgacgctgccgactactttaatctttttcatatcatacctttaccaatgggccagggtttttcagatactgttcgatgatggctttcgccgtccacagactcagtgcaccaatcgttccggtcgggttgtacccggcgttgttcgggaacgacgatgcgcccaatacgaagaggttatgggcatcccagctttgttgataacggttgagcacgctggtttttgggtcttcacccatgactgcccccccaatggtgtggtcactggcaaaactgtatggcgaataggaggtgttggtggcgttggtcccgatgaccagtttcgcgcccatcgccttgcctatctcgacgcttctgtcctcaacgaacttggcagagcggcgatcgttctcgttgtagtcgtaggtcacgcgcagcagcggattgccgttggcgtctttgtactctgggtcgagatcgagatagtaatcttcgtgcgagtagctggtgccctgcccaaagatgaaggtcccgttctggaaggcgtgggtgtaggctttcttccagtctttaccccagcgtggcgtacccggaggcagtgcatcggcgttaccgattggccgagcgccgcgggcaaccaccaaaatacctgccccgccgatgaagccttttccggtatggtcgaagttatcgccgttccagtcgtcaacctgctgcgagagcgccccggccccgataaactgattgaggtattcgtcttcaaagaacaggttagcgccagaaacggtctggaaactgtaggcgcggccgacgacgccggttttggtcaccggatcgtaaggtttgccgattttggaaagcagcagcatacgcacgttttgcatctggaaggcagaaagcacgacgatatcggccggttgttcccactcctgaccgttgcgatcgatgtaggtcacgccggtcacggttttaccgtcttcagccttattgatgcgggtgacggcagactcggtcagcacggtaaagttttcgcgctgcatcagggccggcaccacgcaggcgttcgggctagatttggagaagttgccgcagccgtaataaaggcagtaaccgcagtaggtgcaaggacccatgcgcacgccaagcgggttaacgtaggctttggaagcctgccccgccggaaccataaacggatgctgcccgagtgacttggccgcatcgcggaacaggtcggtcaggcgcatgccttcaagcggcggcagcggatattcgctgctgcggttgccttcaaacgggttaccgtcttcgataaccttaccgttgagcttgcccgctttaccggaaacaccggcaattttttcaaaacgatcatagaaaggctccagctcttcataagtcacccccagtcctgcaggataagccctttgactatctgttgtttaccgtaacgctgaaccgtttgcgtgtagggttgaaggtcaaacggcgtgaagcgccaggccatgcccgcccagtgcgtgccagaaccgcccacgttgtaacccatctcgttcaggttccagtcgcgggaaggcagcgctttttgggttctgttgttacggaaggttgtggtttcaacggcaggcgggagcagcatgctgcggcgggtatcccagcgcagctcatcggtatcaatggaaggtgggaaatcggtggcggtttcaaaccatgggccacgctcaacggcgaccacgttaaggcctgcgcgggtcagctcttcggctatcagggacccacaccagcccagtccgacgacgacaacgtcagcttttggacggatatttttcatattaggactcgttgttgctcaatcgcttcagaattccagcttaaagagtgttatcaatcaggctggttggaataatgtttaacttctgacctttcttgctcagcagatcgcggaagtcatagcgcgcacctgggaaaccaatcattttccagctcgccatatctttgtttccgccgtaaatcgggtcggataaaaagccttcgcgcacgttctgcaataaaagttcgaagaaaactttggtttccacatctggtcccaaatcgagcttgcctgcttccattgcgtgcaatatctggtcctgctggtcaccgctcaggtcgacgaaattcttgccaaactgtttttggagggtcttgtccagcgcagccaggccgacgcgataacgttccgctggcgttttcgcctcttgcggcccctgttccggcgtgcccttgacgaaacggccaaggcggtaggtgctgcttgcctgaccaaaatccccggcaagttggcggtcaacgaaaatggcgcaaccggcctctttgccgctaatgctcatctcgtcggccgggataaagcgttcggcaatcgcaccgacggtatcgaactcgtgctgcgtaagatactgcaaccccctttccgtggctgagcgagaggtcgggtgtctaccttgcccggttcccacggttgaccgcctttgacttcctgcgcactggccaacggaatcgttgacgtcacgcccaaaacggcaatagacgataaaaattctctgcgtttcatgaatttcccctgctcaaataagttattactgcactgtccagagagtaataaaaacgacacttaggaataaaaagagaatggctattcttgatatagagacatgacagaaaaaccgaacccattagtaaatgattatgcttctcattaatcgtcaagttttaagcaatgggaatccgagcatttttaaataaacgctttgaggtatttattattgcttagcactgattaatttacgtcgttttgaatataatcctgttgttaagccctgcactcatatctttagcggaatacttttactatattgattcacaaaacaaatgtaatcgggcgaatagtaaacccatttgaagagtggtggtacttttggtttgatggtttcccatcatttataaacaattttacaacataaaatgcgcttgctgttcacttagcgttccagataaaaaaacatgctgatggcgcgacaaccgtgttgccaaacaccgctcgcgggttaaactgcgctaaaaggttgtctcttctctcaaggaagccggtatgaaaaagcttaccctcgaaacgctggcaaaaatggccggcgttggtatagcgacagtagacagagtattaaatgaacgcggtggcgtctctccagaaacaacacgcaaagttttaaaagccgcaaaagaggcaggattaaaccgcacgctacccgaagaacgaagaagtccctggcaaatagaagttatcttaagttcaaatgatacttattttttaagaagctggccgtggattttagagaggtcgccaatgctctgggctatcaacgcctcacattacaccgaacgcttatttctgaatcgcagccagagaagttggctcagcatattattacctcgagccataaaagaaatggtttgattatttttgcccaaaatcatcccgccgtttataaggcgctcgagcattgcaagaataaaggtttgccggttattacgctggtcaccgatctgcccgaatcacagcgcctgtgccatgtgggaattaatcaacttcaggccgggcgcacagcgggattattgatggccaagatgcttcatcagcccggagaagtcatgatggtcagcggacgcgtcgattttagcgctcaccgccagcgtatcgaaggcttcaaggaagttttgcagcacagggcgccgcacattcgactcaccgaagtcctggccggacaggaccatcccgagactctgcgtcggctgcttgaacagacgctggcgcagtctaaaaatattgtcggtatctataacaccggtgacgtcaacgccgaggtgagcgaggcgctggcaagacacaaattgcaggggaaatgcctgtatattactcacgagctctatgacctcacgcggcgtttgctcgaagagaatattttgtccttcacgctggaccagaacgcccggcagcacgctcagcttggtttaagtctgctgctacagggactggaagaaggcttactgccggacacctattcagacggcaaggttgaattcaagattatgaccgcagagaacgtcgattaggctttgagaaaacgtcaagcttcctgggccgccctgtaacgggttgctggcagacgaaggcgttttaccctaacttgatgacaaaatgattttggcacccgtccctgggtgccaatacgtttaatagccgaaactgcgtccctgaagagggagatcacaatacagcacaaactcttccgcgtttctggcggcgtacaggcggtaggtttgctgcgcaataacccatttttgctcttcactgtgccagttggcaatggccttagactcaagctgaagcgctatctcgcggctttctcccggctcgagatgaacgcgttcgaaggcgacaagacgcgcagcgtagcgtttatcggtcggttgaatatagagctgtacgacctcggcaccggcgcaatgaccggtattggtcaccgttaaacgggcatcaatcacccctgatgcctcttcgacagccgctaaatggctgagctcgaaggtggtataagaaaggccgaacccaaaggggaaaagcggtttctgcgcggtgcgctcaaaccaacgatagccgacgtcagaaccttccacgttatagtcaatgtgaattatccctccctttaccgggcttccgggtagcgatgtggtgctttcaggattgacttgtttaggatgcggcaactgcgcttcgctggccgggaaagtcacggcagacgcccggagggattaacgcgaccaaacagcacaccggcaatcgcctcaccgcctcccgacccggggtaccacgcctctaacaccgcagcaacctcatcgagccagggtaacgtgacaggtccgccggtttccagcaccactaccgtctgggcattcaccgcggccagtgcctcgatgagccggttctgggcctcttcaagccccaatccctgcgcgtccagcgcctctgatcgccattcgtcggcaaatacaatgaccgcatccgcctcgcgcgcctgttgcgcggttttgctaatatcttcaccgctggaaaaaaccacctcagcagcgtacgactcggcgcggatcgcccacagaggggaagacggatgataaactttttcggttttaatccccatgaaatcaatacccggcaggctcaggcagccgaccggcgtgaccgccgatgaccctcccccacacagcacgccgtggtcggcatgcgccccgaccaccagcagcctgttagcgccttttctcagtggcaaagtttgtgcccgatttttcagcagcactatgccctgctccgcctcgcgctgcgcgataagccggtgcgccatataatcgatatcgccgtagcgagtggctggattttcgactgcacccaccgagaaaaggctgcgcagaatacggcgcaccatgtcattgatgcgtttttgcggaacctcacctgactcgaccgcctccttcagcggctgcccgaaccaaacctgccggtcgagattggcaccagactgtacgtccaacccggccagcgcagccttcgccgccgagtgggtcgctccccaatcggacatcacccaaccgggatactgccaatcgcccttcagcacctggtttaataaaaattcattttccgacgcccattcgccattcaccaggttgtaaccgggcatcaccgctcccggcttgccaatcgcattggcaatctcgaaagccagcaggtcagactcacgcagtgcggcctcgctgaggtcagaactcaccaccacgcggccggtttcctgggcattaacggcaaaatgcttgaccgttgaaaccacgtgctgcgactgaatgccgcgcacggagtgtccggccatgacgccggttaacagcgggtcttcggagagatattcaaaattccgccctcctcgcggctcgcgcaccaggttggctcccccggcaagctgcacgttaaagcctttagcgaatgcctcgcggcccaccagagtccccgtttcctcagccatttggcgattaaaggttgaagcaagaagcagtccagaagccagcgccgtggcgttatcgcccgggcgaatattacccagcgcgctgacgccaaggctggcgtcgctctgttgcatagcaggaatacccaggcggggaatagcaggataataggcagcagaacctatcgcaccgtctgggatagactcaccgccaagcgggatagccatcggccctgagagccaggcaaacttctcctcttcggtcatctggttcagtacaatttctgctttttgatcggcggttaagccttctttctgccaactgtatttcactcgcgatctcctgttgaggctattgcatgcccatcgtggataagacattaacaacagtaccctagcaaatcgcgaggtccataaaccgccttaacgtgttattgcgctgcgccaatctgattgagcgtttccagggcttctgctggaattttcagctcggcggcgaccaaattttcctgcaaatgctgcggagaagaggttcccgggataagcaggatattgggcgagcgttgtagcagccaggcgagtgcaacctgcatcgaggttgccccaagcgactgagcaacctcattcaagcggttattttgcaaaggcgtaaagcctcccagcgggaagaaaggcacgtaggcaatctcctgcaccgcaagctggtcaatcaatgcttcatccttacgatttaccaggttgtaaaggttctgaacgcaggcaatcggggtgattttttgtgcatcgacgacctgttttgccgtgacgttgctcagaccgatatgacgaatcaggcctttgtcccgcagggcagccagcgcttcgagctgttcatccagcgtcccctccgccggttgatgaacgtcatacatgctgcgaagattcaccacatccagcacctccaacccagattacgcaggttgtcctcgacggcgcgggtaagatcctcggcgctgaacgccggcagccaccccctttgctgttgcgcaccgccccactttagtgacgatacacaggtcgtgcggataagggtgtaacgcctttttaatcagctgattagtgatgtgtggcccgtaaaaatcgctggtatccatgtgacgtacgccggactcaatggcatcgcgcaacacctgaagcgctcgcgcctcatcggctgggggccaaatacgcctttcccggccagttgcattgcgccatagcccatacgtggaacctggcggtcgccgagttgataagtcaatgttgctgtagacatgaaacacctcctgagtgagtgacacagtaattgtatcggtattattactgtgcaactattaggctaaataacgacaaactgtacgggatggcggacaatgcagttggatatagccctgcttcacgcggtggtcgcggtggccaaggcgggaggatttcgtgaggcggcacgcgttaccggcagcaacgcttcaaggctgagtgattccgttcgacgggccgagcagcagctgggggtgcgcctgtttcatcgcaccacgcgcaccgtggcgctgaccgaagtgggtagagcgctgatggaaaggctgatgccggccatgaccgaagtagacgccgcgctggacatcatcaatcgctatcgcgacacgcctgcgggcacactgcgcctcaacgtgccggtcagcgccgcgcggctggtgctcccgacgctggtgccagagtttttggcgcgttaccccgacattcagctggaagtggtggcagaaagcaacgtgcaggacgtctttcgcgaaggctgtgacgccggtatccgttatgacgaatgcctggagcaggacgtcatcgccctgcccattggcgctcgtcgccagcgttttgccgtggccgcttcgccgcagtatcttgcacgtcacggacggcctgagcaccccagcgaactgttgaaacatcgctgtatacgcggccgttttgcgagcggcgtcatccccgagtgggagttcgagcgcgacggtgaggtagtgcggattcagccctgcgggcaattggtggttagcattggtgccgcggttgacctggcggtcgccaccgccattgcgggcggtggcattattcagctgtttgaggaatggctgcgcccatcgcttgagaacggcgagctggagccgcttcttcagccctggtggcccagcttttcaggcccctatctttactaccctgaccggcgtttgactccgacgccgctcagggcattcattgattttattcaggagaaaaatcagctttccctcagcaatttctcagggaaaaatcatcagaacacgtcttcaatctcttaacggcagcggttttctcgcgttttcgaggcgtcttttctggctgataaaaaatccgcagactcccagtgcgaacaccccggccgccagaaatagggtgcgggtatcctgtgagagatagcccataaacgccgagagaaactgcccgagaaagatagccatcgaaagacgcgccaggttgtgggcgcgctgtgtcaggcttgaaagttcaacgataagatgattaaccaacggaatagagaaaccaaatccgcagcctaacgcgaccccacccaatataaacagcggcattgaaggcgcaaaggcaaacagcaggtgcgcgaccccataacaggcaaaggcaacacagagcgtgccaaagtcggaaaatcgcttaatcagtttcggcatcagccaggcagcaaacaccgcgaccagcgacacgaacgacagaaaataccctgtttgagcctcagtgatcctcagcgcgtggaaatgcagaggcagcaggatgatggcggtgaaaaaggtaatcatcgagaataccgcagccagataggtcaaccttatcgcctggggtgcctgtgtttgcgtcgcttccccttcctcctcagccacgccgtgggcaggggttttcggcacaaaagccaggaccagccccagcaggatccaggcaaacagatacaggcagaacggccagcgccaacctgcggttgccaacaaaccgccaatgaacaggaatatcacgccgccaagctcgatagacatccctgacgggcaatcatctgcattctctgctcaccgcgaaagaagactgaaatcatacctgtaccggtcgacatcacaattgccgtcgcccctccaagcagaattcggtcggcaaacacggccaccgtgccgtgcataaatacccccgcagcgccgaaaagaccatagaaaaacagtccgtaacacagcgaaggatacaatccgatgcgatgagcgatacgtccggcaagaggcccgaagataaccacgcccagcgaaggcagcgtgaccagccaacccgaggcatgttcgaccccaagctgtcgggctatcgagggcagccccggaacaatcacgcagcccaccatgatggtcaggcaggctacagccaacagcgtaaaccctcccattttggacagagttttcatgctaatccttaaaaaatgaatagtgaccgttaaacggaatatataaccactgtacggtcacacttttaaggccaatttatgataatgtcaacgtctcaacattgaagatcgatgttattcacccgtttaaataaaggatccagggatgtcggaagagtcggacaagaacggcaaacaggtcatcgcacgcgccgccgaggtgctgcgggcgctggaaaaatcacgcgtgggaatgagtctggcgcagttggccagagagaccgatttgccgcgcacgacggtgcaccggttagtgaatgcgcttgaggcacagcagctggttcagaatgctcacgatggcatcaagcttggcccggccctggcccgcatggctgccgctgcgcataccgattttgtgactatcgccagaccggcggttgaggcgctgggcagaagaacgcgcgaaacagtcgacgtcagcgtgtatcgaaatctgcatgcaatttccgtggatcaatacgcatcggatcaagagctgcgggtggtttctgccgttggcacagcatttccggcccactgtaccgccctcggcaaggccatcctggcgcagctgcccgacgagtttctgctcaaagccgtctcgctgaatcttgaggccaggacccgacagaccctgaccacgcgtgaagcgctgcttgaggacattgcgcaaacccaacgcagggctatgcgctggatatcgaagagcacgcacgcggcgtctgcggcataggtgtctgtttcaaaaccgggcacagtgatttttatgctatttcactggcggtaccagcgctgcgtttcgaagacgagtctgcatcactcatcgccgccctgctgaaatgcaaggccgaaattgattcgctgctatgatgccagagcgtcccacagcagtgagcctcctgccagcatcagcatggcatctatcaggtaattaaaggttttttcagacattttaatgacaaaacgcttgccaatgtacatgcctgccacgagtgtcaccccaccagcaggccgcttatcaacagcggagcaggcagtgcgccaagcgccccaaaggttgaggctttagccagatagatggcaaacgaggccgcggcttccgtcgagagcagcgcgccttttgccagcccgtaagcggcaaaaatcgggatagtcagcggacccgtcgagaaaaccacgccggtaaggtagcctaccaacgccccggccagcgccagttgccaaaggttgagcgtaaacgcccgcgctcttgcccagaagcgcagcggaaccagcagaaagaaaaaaagcccgataaaaacgttcgataaggcggcaggcattatccacagcgtatttgcccccagcacggcggccggaataccgggaagtgaataggtaaaaaatgccttgaaattaatctccttgcgccagagataaacgcgcgaaatatttcccatgatggccgcgattgccattatcgggattgccgcctttggcccaaaagtgtaggccagcgacggcagcagcataatcgatgcccctgtccctactatcccgctaatgacaccggccccaatccctatcatcacaatgattaaatacatcacgccatacgctcctttctgaatacgataagcgcgatgatagcgattaataaattcacagactcgtgataaaacatcacaggactgtgagtaaaaaggagcgatcgtgcattctcttccccctctgaccgcgctgagcgcgtttttcgtcgcctgccatgcgggcagttatactgcggcggccaaagagctgtatatcactcatggcgcggtcagccgacatattcaggtagttgaaaaatggttcggcgttaacttgtttatcaagcaagggcaacgccgggtgccgacaccttatgccctcaccctcgcgcgcgagttgggcggcgccttggatacgctgtctgatattgctttgcgctacggcaacggtggccgaaataacgtgttcaacgtcagcgtgcccacgactttaagcctgaaatggctgctgccgcgcctcgatgatttttatggccgctatccgcaggcaaacctgcagatatcctcggccaatactgaacagctgcatattatcggtcactatgacctgctgatacggcgtgaacccagtatgaccgagtattcggcaatcccctttctgcaggacactcattgcctgatggcctcgcctgatttgctggcgcgttattcgataaagacggtagaggatattgttgcctgcccaagaatagaaacgctaacgcggccggggcattggaatcagtggctggaagccgcaggggtgaagaaaacaccggtgaatggatcccgccgttacgatcattttcacgtttcgctgcacgctatgctggagggaattgggataggcttaggaccggtcaatacgctgtcggcggaaattgtgcgcggaaatttagtgccactgtttccagatatccgcattgccccatgtcactatcatgcccttacgccggtcggtgtgcagaagaccttgctgcatcaggcgtttgaagactggctagtgacacagggctgcgcctaggctatgccccatattggctggctgagtggctgacttcttgtgctgagcctttttctctttcattttccagaaaacaaacagcatcacaaaccacagcggtgaaacgcacagtgcggccagcgtgtccggatcgaacagcataatgaaaatagtaaaagcaaagaacaacagcgtaagccaggtcattggaacacccgctggcattttaaacgttgattttacgtgtaaatctggacgttttttacgatagaccagataggccaccagaatcattgcccagctgtaaatcaccaggatcgcggccaacgtagagacgatggtgaacagggtcataacattgggcaccaggaacagcagtaaggtaccgctcagcatgcagaaacaagaaaagaacaggctgcgcaccggaattgacgttgttctggaaagaatacggaactgccagtgggcatgtttctcaaccgacaggccatacagcatgcgagtgcttgaatagacaccactgttggccgaggacattgccgaggtgagtgcgacaaagttgataatggcggcggcggccggcagaccggctttatcaaacagcagcacaaacgggctgacatctggagaaatggccgcccatgaggtcacggcgataatcaccgtcatcgacagcatataaaaaatgatgatacgcagcggcagcgcgttgaccgctcttggcaggattttctcaggattcttggtctcagcggtcatcgtaccgagcagctcaataccggtataagagaaaatagcgatttggaaaccagccaggaatccggctatgccgtggggcataaacaccgcagggtcagtcaggttgtgcacggaagcgcggacgccgtccggcgaggtccaaccggttgccaccatccagccaccggtcaggatcagcgcaataatggtcacgactttgataagcgcaaaccagaactcggcttcaccgaacatttttaccgacagtaggttgaacaaacacagtacgccgagcgtaaacagcgccgggatccaagcagacatgtgtgggaaccagtactgcatgtagccaccacagaccactacgtcggcgatgcaggtgactacccagctcagccagtacgaccagccgagaaaaaagctcgcctttgggccgagataatctgctacaaaatctgcgaaagaacgataatcaagcttcgagagcaagacctcccccatcgcccgcatcaccatgtacatgaagaagccaaccagcatgtaaataatgagaatcgaggtgccggaaacggcgatattcttgccagcgcccataaaaaggccggtaccaatagcaccgccgagggcgatcatttgaatgtggcgctcgctcaagccacgctgaagttcttgaggagcatcaagctcatcggcaggggtaacctgccgttccgtgtttttttgggtcattgcaattcctttcccttgcagaaaagccatggagcggcgggttgagggaagcatgctgaccttggactttaacaaagtcaacacacaaaaacagccttccattcactttttgacccatttcaaagttctgataattgagggaaaaaacttttttatgcaccaaattgaatagtaaatgcataaataagcatctctatagggctatctactatgtataattattcatttaatgaataggttttgggcctaaaaagacctttttcctctgtcgcaaataaagacagttttctaaaagctgataaaatcactttcgcacagttaattgcacttctcttccacagcttcacaaaataaatgactttatttaaaaaggctttttatggaaaagttatcctacgcgtcagaaagcagtacatctccctggactacctacctgcgtcaaatcgatcgcgtcgccccttacctcggtgacctgtctcgctggattgacaccctgcgtcatccaaaacgcgcactgattgttgatatccctttgcaaatggacgacggttctatccgccatttcgagggttatcgcgtgcagcacaacctgtcacgcggaccgggtaaaggcggcattcgttatcatccggacgttgatctcaatgaagtgatggccctttccgcctggatgaccatcaagtgtgcggccgtcaacctcccttacggcggcgctaaaggcggtattcgtgtcgatcctttcgcgctgtcagacggtgaacttgagcgactcacccgccgctacaccagtgaaatcggcattattatcgggccacagaaagatattccggctcccgacgtcggcactaacggcaaggttatggcctggattatggacacctactccatgaatcacggcaccacaattaccggcgtcgtgaccggtaaacccatccatcttggcggctcactgggacgtgaaaaagccaccggccgtggcgtctttgtgaccggacgtgaagtcgcgcgccgtgctggcatcgagaccgaaggtgcccgcgttgcggtgcagggcttcggtaacgtaggcagcgaagccgcacgccttttcgccgaaattggcgcccgtattgtggctatccaagaccatacggcgaccctgtttaacgatcagggtattgatatggcggcattaagtgagtggcagattcagcacaagcagattgcaggcttcccaggcgcacaggaaatcgacagcgaagccttctggacgacgccaatggatatcttgattcctgccgcactcgaagggcaaatcaccctcgaacgcgccaaactgctttcgtgcaaactggtgcttgaaggcgcaaacggcccaaccttccctgaggcggacgatattctttcagagcgcggcgtcattatcgtgcctgacgtcgtctgtaacgcaggcggggtaacggtcagctacttcgaatgggttcaggatatggcgagcttcttctggagcgaagaagagatcaacgcgcggatggacaaaatcatgactgacgcgatggtacatgtttgggaaaaagccagagacaaatcctgttcactgagaaccgcagcctatatcgtggcctgcgaacgcattctcatggcacgtaaggaccggggtatttatccaggttaattcaccctagacttcatcattttattaatcccgtacgtggtaaattccgtacgggatttttttatcactttttgataatgaagaaacgtcctttttctggcataaagaactgcgaaaaattcgggctataattattatcttaaataatggcctgcgacaatggattgaaaaataacggggtgaaatttatgcgtaaattaacgactgcattgctgtgtatggctgctttattacctgcctcctgggcaaatgcgcaggttattaccaaagaacagcagcaaaaagtggagaagaaagcattgggcggcggtaaaggcactgttgatgctgcctttgcgtttactcgtgataaagcaaaacccgatcaggctattaaagaactgagctggttgaccatcaagcccggcgactcgattggctatcacaagcataaagacaatgaagatgcctatatcatcgtctccggcaccggcacttttaaagacaccgacggcaacgattatccggttaaagcgggcgatattaccatcgtgcgcaagggcgagtcacacggcctgaccaacagcggtaaagaaccgttggtcatcgtggacgtgattgctgcacaacagtaatcaatcgacccgcagaggtcatgataatccgggagcgtcttcccggattttttatgtgcacagcattccctgaagcaagctcaactagcaactcgattagtaccgtgagtcgcccactttcctcatcatcgccacaatcataagcgccattgacctgaaaaccgactctccgttgaaggcgttgttatccgctgaacccctcgattttagcgatttccccttatttctctggaagaaaaagtattttctctatatcagcaaggttgattccgacccagtagtcgtgaattccattcagtgagtttatatatcttatcttaaagcagaaaaactcaatgttacaaaaggaaacaaatggttacgattgcagaaccttaataatacaaagacatttgacatgaaactaaaccacctagctatagcgattgctctcgcctctgtcccagtaatcgtctttaaccaagcacaggccagcattaatgtctttcttgataaaaacgctttaaaaaacaacgttgaaggggcgctttctggtagtgtgaaattcgcccaaacccatactattgatgcgagtggcaacagtgaacaagaaatgccaagactcacgagcacgcgtgacacattggtgatgtttattccgcagcaacaaaatatgaagagaattaccctgcgtgcgtatgacaaaagtggtgccttactgggtagcctagtgatgaacgacccggatcggttagcaaaatctgaccgccctgctgacagcaagaagccggacgtagtttacagtgatgaagcgtggagtcagagactgcctgccgactgggtccagccgggtttatctctggagttttctgctgataatggacgtgagagcaggctaaaaaaaatcgatatcgggggtgaaacgcaggttgttttacaaaacatccgtatcggtatgctaacggctcctggaccgctgaaagataatgcattagaaaaagaatcggagaaaatggcgcgtgattatttccagaaaataccggcttcgcaattaattgttggcaactactcaccacttcacttaaaagaagtcgttttatccaccgggaaaaaatatacctcacaaagtgaggatataggcagtggttacgatggtgatatgcgggaaaatattgctaaaggtgttatctccatgggtattaataatgccaattttggtattaactcttctcagggcgaacgccagtggcaagccgccctttttcatcaggtcgctgttcatcaatcctggggacaataccgtaacggcaagctacagcatggatttagcggcggtaatggcatggccacagtgtacgacacggacggcaatgagtttagtcacgaagtcggccatggttatggaatggggcactatccggggggcgggaagtacgccactcacaatcagaactcaggttggggatgggacgaaaatcaaaaccgttttattgctaattttttctgggataggagcggagatgcggttgtagaaggccataccactccaccttttaaaggaatttatcgtttcaacagtgacacgatgggcggcggtgtagccagttctccactttctcgctataccctccacaccggctatacccaaaaacgcgttcagcaatcgctggagtcaaccggggtcattacgccaacctctgcttctggttatctgaagtgggatgaaaaacaaaagaaaatggttgaagcgaatgacttcccgcgccgcaaaccatcggtatttggggttcctgtgactacgctagtgggcttttatgatccgcgcgatgagctggaaagttatatttatcctgccttacagggcagttatggttatatttatcggccagagcctgtcaaagcggggcaatgttgggccgaggttgcttaccgtaacggtgaatccgagaaatttgcgctggaagggacacgtatacaatctaaccatatgaataaattccacatcaatgtgcctagcagcaagcaccccgaatccatgattattgcctgtccatctaaaaacatggaggaaatgtatacccagtggaagctgaaaaaactcggtgtagataaaatttacctctgggacacaaacaagaatgaaaaactggggtccgtctacaactatgaggaatatcaatattatttcaaactaaaaagtaagcctttctggtacttccctacggcaaaagtagacaatagggattggacttatttaaccgatgagaaaacacttaaggatgaatatgagaaccagctttctttgctgaacgcagactattttggtcaaaatgtgttagcgcagagcgatattcacaccgccagcgttgccccaatgcctgctgcaacagtaggacatctttttgcaaaaaacgcagcacaagcgccagttgccgtagccggagacgattttaccgtcacaccaaccaaatacttgtctacggcttacgaactggatgccagtgctagccagaatgcggtgtcatataaatggaccatcctgaaaggcgcgggtaccttctggttacaggagaaacacgcaggtttgtgggtcagggaagtgagaagcgctaaagcacgagccctaatcccagcaaatactcgcggtgaagtcacctacctgctcaccgtaacgagtaaagagggtaaaacagccaccagccagataactgtttcagtgaaagagaatgaacaagtgaatcaggaccaggcatttatggacagcctgaatctgcgcatgacttctcaagataaagattccagcgtgttcttcaccgggaatatcgatgtcggtacacagcctaccagcaaaccgggatacgtttggacactgccaagcggagcaagtggcgcaaacaacggcaaaactgagcaatctttcagcatcatgaaaaccgaccgcatccaaacgctgaacgtcagcgtgcaggccgctgcaggtaaggtctcgcgtactctgcgacatacgattattgttcctgccaaacaggagaacaacaacataccggcctgggatagcgcgaaaacctacactaagtcctgcgttaaagtcagttataacggcaaagtatggctgaatggttggtggacccggggtgaaaagccgaataacagtggcgagtggggtgtatggcgtcaagaaggaagcaaaaacatgcatctatcttgtaagtaaatgatgttatgcaactcgtagtgcctgaaattcaatataggcactacgagttgctttgaggggtcatttggccgttaattcacaatgattcattttatgcttcaaatttacattgcagattttttcatcccctcacatgcccggcacaccgataccctctcaaagtgcgctttacagcagtcttccccccaataccgtcgcggaacgcccggtgccgagatagtgggtctctagaacaatgatgtttgccgccggaggcaacaggcagaagagatagagtacggcggggtttttgccaaccagggtttgcccagtcgctctggcaataagcagcaacagcgtcatgggcacggtcagcgcatccctgtgcctgctattttatgacgacacgccagtcagattccgatcggctgataaccctgccactctgggctgaaaggtttacccgcattgctcggcgtcagatggacataaagatcgccgactttgtccagcaggatacagtcatctacgtcggtaagattatctttatgctggtgcaatttacccttcaacaacgactcgaggcctcgggcctttgcctcacgggaatcctcggcaacgaacaagtcaaaggcgtgcaattcggctaacgacgaggggtcgtaagcgcctgcattcacaaaaaacagtttcttattatcggccggcggagtctcagacagcgagaccgcgtagccgtctgcccaggtaattcgagcatagccatcaacgtgaattttatcggcatcaccgaaccaagcctcacgcagtgcaggccaggcatgttccggcttttcggcggggacaaactggatgtcatggacttcaatattcgattttccggcattcccgccgacataaaacataaaaagatgcacgctgaattcctcattaaaatcacgttttttcaaaaagaaagatatcaccccaccttcgctatataaaataagctgagcggcgagaccgggatcgtagataaccggctgagggaaccagggatctcccctctgatactcgataaatcacgcgataacgtttgcagcaaatcaggatgcggataaattgcccgatatccccagcctacagggattcagcttgtccggtgtgcacctcatcagggttgaccaacacaatatgcccctgcggcgcaacgtggtctcctccgctgcggtagaaacgttgggcacccttttcaatcagtagaatacaaaatgtctcatgcacgtggcgtgaaaaaaactgctcgcggtaggatgccttgagcatctcaaggccattaaattctggcagttgattgaacctcgcctgttctcttataggaatcactttattgaaataaactcgccgctaaggggaagtaatctgtatacctctagtttattttaaattcttgaacaaaatggctgtgggaaaaaatttatgtccttaaatttggtaaaaatgaatgcttaaaaatcttaaccatcttacactcgccgccagcgatatcagccgtagcctgcaattctacgtcgagattctcggattcattccgcatgcgcagtgggatcaaggggcttacctttcactggggcagctatggctttgcctgtcgaaggacagcgtcgacacaaaacgagactatacgcattatgcgtttaccattggcatacaagactttacggacttcatcttaaaattgcgccaggctggcgttgttgaatggaaagaaaatcgtagtgaaggtgaatccgtctattttctcgatcctgacggtcacaaacttgaagcccactgtggtgacctgcaaagccgcctgcaagcctgtcgacaaaatccctaccagggaatgaaatttttttgaacctgtcatcagatctgccgtcatagtacggcataatttttggaaagagatagctggcggaatgattgattttagtgaagcagtaaaacgttctcaggataaaaccgatttccggatccgattaaaacttatcgcggaactccgccagtttcccggcgaacagagccagcagatgttattgagcattctgcaaaacgattttgtgttttcagtcaggctggcggcatgggaagcactggacgccgtcggcgtggtgcagaaaaaaccaaaaatcgtgcgcgatcatcctttaatgggttttctgggagacatcagattccagttaattcgtatgggcgcctgggcaggtgacggctcctttactaactagtgccccggcgaaggaagcgaaagcccccgcaaaatcgtttgtagccactggttcgctgcgcttttaccgctaaaacggtggctgtatattttcacctgataattcggcacataaaaaggcagcgggaaagcgttgacgtcgaccagtcggcagaatttttctgcggcaaagcgtggaagggtcatcagcaaatcactctgcgcgacaataaatggcgcacttagcatcgagggggttttcagggtcacatgacggtggagccccattttttcgagctgaaaatcaatcacaccccgcgcctcattccagggcgtcaccacgacgtggtgagctttcaggtactcctctgtggttaacgtggcaaactccttacgtctgatggcgacatactgatcctcaagccaatcaatcgcctgtatttcatcatgtatattttcatcgggttcgctaaagcccagcgcaaaatccagatggccagccagtaactcattaatggccaacatctgtggcgaatagagcagctcaaacttcacgccgggcgctcgcttttgcagttcggccatcagttccgggaaaacgcaaaacgcggtgtaatcggtgatagcaaccttgaaacacacgtcgctggtcaacggattgaaatccggcttgggcatcaggtgaaaattaagcaatcgcagcgactcggcgacgggctctgccaactgattggcataaagactcgcccgcatctgatttccttcgcggaaaaacaacggatcgtttaacgtgcttcgcaatcgggtcagcgcatggctgagtgcggaagtactcatcgccaactcgtcagcggcgagcgtgaccgattgatgccgataaacggcatcgaaggccagcaatagattaagatcgagtcgacgcagcgcagaatgcataattttcaatttccattgataagattgcacttaattcaatattaaactgagtttatgctatcgccttacacatgaacagacacaggacctttccactatgagtattaaaattcgctcagccgtttccgacgatgcgcaggcgattttcgacatgattgtcgagctggcgatttatgaaaaagcgccacaggaagttaaaaccaacgtcgaagagatccgtgccacgctgttcggtgaaggcagtaaaacggaagcgctggtgtgtgaggttgcgggcaaggtcgtgggctatgccgtgttcttcaccagctactccacctggctgggccgcaacggcatctatatggaagatttgtacgtttcacccgagtctcgcggcgtcggtgcaggcaaaggtatgctgcaacagattgctcaactggccgttgaacgcaactgcggtcgtctggagtggagcgttctcgactggaaccaaccggctatcgacttttatctcagtatcggtgcaaaaccccaggatgaatgggtgcgatatcgcctggatggtgaagcgctggtgtcattcgcaggacgctgataaggctgaatcagcgtccgttagggtttactcggccctcaggtcgtcgtaagacaccataacgtgttcggcaaacgccgggcgctgggtcaggttctggtaatactgctcgacggccgggaacgaggctctctcgatggcgatatcaaagtagcgatacaggacgtgtccgaactgaatatccgccagcgtgaaggcctcaccggcaagaaatggctgtttagtcagctgattttcagcaatttgcaggtatttgtggaaaacatttaacgcactggcaatcgccttctcgtctctgtctttagccgccgttctgaccactcgccagaaaatcgggccggtaaaggttccggcaatatttatcttcgcccattcggcccatttatcgacgttggcacgcgcctgtggctgctggggccaaaaatcgcccgtgccatattgggttgccagatagcgcaaaatggctccggtctcccaaatagcctcgccgccgttgtcgcgcagtaccggcacggtcccgttgggattcatttccagaaactctggcgtatcgttaccaccaaatttgtgtccaatatcataacgttcatacgccagattaagttcagcaatacaccacatgagtgcctgcacgttggacgatgtcttccttccccagatgctgagtttgccttgcatttttgattcctcttaaagataccgccccagttccgatttggctctggaaacaatccagtctctaaactttttacctaaacgggttaacagcgccgactcgtcatagaccagatgatatccggtcgataccgtcaccgcagcagaaataggactcactaaccgcccctccgccatttcctgctcaattaatgaaccgcgaataagcgcaatgccctttcctgccagcgcggcgtcaatcacgccgtttgaattaataaaaacaggaccgcaattcgcgtcgctatcatcgacgcccagcgcacgaaaccaaagccgccagtcaagacggtgttcatcgtgaagcaacgtgtagcgcaagatatcgcgcgggccgctaaaagtgacgtttgccggaataagaccggggctgcataccacttgcagattgtcattgagcagcagctccgactcgagagccggaaacttgcccgtcccatgcctgatggcaaaatccacgccttccgacagcaaatcgacaagccgattggtggtgctgatacggacctcaacccccggatgcagactctcaaactcaggcaaacgcggcaaaaaccattgggtagcaaaactgctggtgcagctaatcgtcaggcgattgttattgccctcatcacgcaaacgctgcgtcgcctcggcaatctggctaaaggccggtttgatggcgcgcagataaatgcgtccctgagacgtgagttctatagcgcgtggcccacgaacaaacagccgcacgcgcatcagatcttccagcttggcaatttgctgacttatcgcccccggcgtcacgctaagctcctcggcggctttcttcatgctcatatgccgcgcgacggcctcaaaacacataagggcatgtaaaggaggaagtttcatggtaggcccatcatccggtttagttaaactcaactgtatgcgaataaatgatttgttatcaacatcctttaattctaaagtcggtccacagcacaagatgcttcatcaatatttcaacgaaacgtttagccgagcgagagaacagcatgagagcagcggactgtctgagattgttattgttagcagcgatatggggcgccagttttctgtttatgcgaatagcggcccctgcctttggcgcaataaacaccgcatttctcagggtgttctttggctttgttgggctaggtattattttgctcgttatgcggacgccgattaaatttaacggcaagactacaacgtcgatgctgctcggcgtgattaattccggactcccttttctgatgtacagcctggcagcgagatggctaccggcgggttattccgccattctcaatgccaccacgccgttgatgggggcactgataggcttttctttattcggggaaaaactcagtttcaaaaaatgggcgggagtcttgctggggctgttcggtattacgctgataacgacaaccgacgagattaatggtttcgacaatgtcctctggggcgtactggcctgcctgatagcgacagcctgctacggctttgccggatatcttgcaaggcgatggatttccaataaaggcggattagatcccaaaattgtcgcctttggaagccagatggggcgacctgtttcttgctgccgttcttcggttataccaccacgttcggcccggcggtgaattggcttagcggcgaggtatggatctgcgtgcttgcgctcggtctactctgtaccgcgttggcctatattctctatttccgattaatcgccgatattggcccaatgcgctccctgacggtgacctttttgatcccccgtttggcatcttgtggagttacctggtgctcgacgaaaaggtgaatcagggcttcgcactgggcggcgtgattgttgccgctgccgtctggctagtggttgccccggccaaaaaaaacgctgtcgagcacacagattctctcagacactagcagagcggcttgccataagccctgacttcattctccaggaagtcacaaccggcggtcactcaataaaccgccgcaggccgctaatagagcaagcgcgcgttcagcacccgagtctctttgcaacctgataattttcactccagaaaattacccctcgacaggttgccagataaaacgctcatgccgtttctcaatagtccccaccgagctgccgctaaagtgggagctaaaataggtcgtgcgatcgcgggcaacctgctccagaacctgtagacgcgttttttctgccagcggcttgtcttcacaaaatacgcacgccagctgcggttgctgaatttgacgcagattatgcatgacgtctccggcaaataggccctgttctccgcctgaggttaaacgaatggacgtatggccggtgcaatgaccgggggtaggaaaatattcgaagacttcatcaatcacgccgcctgaagccggaatgaaatcggccaggcccgcctctacaatcggcactacgctgtcgagaaacgcagcataacccgacaccgtcttgccctgttcagtcaggaaaaactgatagctctgttgtggaaatacatagcgcgcattggggaaagtcggcacccacttcccgtccttaaatgaggtattccagcccacatggtcggtatgaatatgggttatcagcacataatcgacctgctcaggcgtaacgccctgttcggccagacgttgcaggaacggattatcgagatcgctaaaaagtggtgaaggtcgcttcctgccgttgccaattccagtgtcaatcaggtaaatcttgccattgttttttaccagccagccatgaacgcttagcgtgattaattcagcagcgtcggcccattgcgggaataaaaaatctgatttgaattcgagcgaggtttcaaagattttactaacgacggccgtgcctagcttgtggcctgaaagctgctgcgacataatggactccaattgataccgaacggtatcaaaataatgagaccgatcggtatcattcgtcaagaggtgatgatgaaaaatacaacagagcaaaaaatccctccgcgagagcgcattctggccgccgcagaagagctgttttatcaggagggaatacgcggcgtgggcgttgaggcgattgccgccagagccaacaccacaaagatgtgtatttatcgccattttgaatcgaaagatgccttggtggccgaatggctgcgtctggcctccgaaaaatatgacaacgtgctcgaaaacttgcaggcacgatttgaagactcccctaaagcgcaactgatgggatgggcgaattttattaccgacaggctccttgccaaagactgccgcggctgtgcattcgctaattcggttgctgaaatacccgataaagatcatccggcgcgccaggtgattgaacggcatcaggtcaatctgaggcagcgtttaacgcagctgtgtgagcaggcgggaatagaggatccgcagaccagcgtctcggagttgatctttgttgttcagggcgcacaaatggccgcacagagttcggaggacaatcatgccattgcagaaaacttactcaagattgttagaagaataatcgataaataacggtcattttcctctgtctcaaagcggtctaaccgtcattgcgccccctgagggtcaggggcaaggtcagccaaacgggactttgacggcgtcaataataaaatccattaccgcacgaatctgcggtgaatgcctcaggtccgcgtggatcaccaaccagatttcacggctaaacgacggtccatcgtaaggaagaagctgtagcgtcgggtccgtatcgccgagaaatctcggcagcccggcgacgccaatccccgtttttgctacaacgtactggctggtgatatcgctgacctcggtcacaatccgccgaccgtttgccacactcattacccacttctgatgcggcatatcggctaaatcttcgccgtaggcaataaactcccactgctcgggattgttggaatgctgatagtctttgctggcgtacagcgcaaaaggcatatcgccaatcttgcgcgcgacgctggtcggctcctcgggccgaaatagccgcacggcgatatccgcctcacgacggctcagtgaaacacgctgtgcctgactggcaatcgacatctgaatatcggggtgctgctgtcgaaactcgaacaaccgtttggcgagaaaattatttcccaaaaccggcggcgcactgaccgtcacctttcctacgcgcgggaactgtgccgcccgcgccgctctctcgaccgcaaaagcgctgacctccatctgcgacgccaactcggcaatctgttggcccaatggcgtgagctggcaggcgcgtggcagcctgtccaccagacgtaccttgagtttttcctccagcagattcagccggcggctcaccgtagcatggtcaacttttagcgaccgcgctgcgccagacaagctgccgctctgtgctacggcatgaaaataacgtaaatcttcccagtcaaacatcggtgcatttttcccagttaactgtgtgcttttaccgaatattcgcacaggctgagtcagactacgatagctaaatcttgatgatgaggaatgcattatggaaagtcatacaccggctcggttgcgcttaatacagcttgcggcctgcctgggttttgtcgttgttctgctcgacgtcagcgtggtcaacgtggcactggaggcgctgcacacccagtttaatgccagagtgaccgacctccagtgggtgataaacgcctacgcgctagtgtttgccgcgctgcttctgaccgccggtgcgttgggtgacaggctgggtgcgaaacgcgtatttatgctgggctttaccattttcactgccggttcggtgggctgtgggctggctccaggcctgcccttgctgatattcgcccgcatcgtgcagggactgggcgctgcactgctggtgcctgcttcactgtcactcatacgacaggtttttctggacgacgagtcccgcagccgcgccgtcggttggtgggcagcaggcggaggcgttgcgctggctgcggggccggtgataggcggatttcttattgcggcagtgggttggcgcagcatctttctgatcaatcttcccctcggcctcattgggctgtggattgtgggacgcttcgccccgcctccgtcgcgcaggtcagtaagagtctcgatctgccggggcaaatcaccggtgcgctgaccttagccagcctgaccatcgcactgaccgaggccagcagcctgggctggggcaatccagtgattatcgccgcgtgcgcgtgctgcggagtcttcgctgcgctgttcctgtggctggaagccaataacccctcggcgatgctgccgttgagcctgtttcgccatccgaccctcagcggcgctaccctcatcggactgatagccaacctgacgttttacggcatgatcttcaccttcagcctctattttcagtttatccgtgactttgcgccgcttaaaaccggcctggccttcctgccgatgatggggattatggtatttgccaatatcgcggcgggtcgtcttgcaacccggatgggggcacgaacccttgccgccacggggatgctcgcctcgtcggtagggtatttgctggtgctgcccggactggccgacggatcctatgcccagatggctatcccgatgcttatcgcagggggtggcatcgcattaaccatcccgaccattacccacgccacgctggccgccgtgccgagttctcaggcaggcattgcctccggcctgctcaacgcggcgcggcaggtcggtggcgtcatcggcgtagcgctgttcggatttctggtccgacagcgtgagacgcggccgtttttgcagggaatggagcatgcgctggtgatttccgcattgcttttgctcgccgcaagcgtactggccttaagatatttgcaggcgcgccagccagacgccttagtgtcgctggactcttaaacgctggctgcaagcgtcgggggtaaccgggcttatcgggcagttgcttgccactaggagagaggaccggcaatgaaacataagtttcagaacctaaggttttaatgacctgctcagacgatgcgccaacggggagacgctggcgcattgatgttgtcgtgaaggccgcatcaagccgttttttcctcgctctcacgctcgccctgtcgcatcgataacgccgtcgcgctggcggcatcaaacagcgaaaggctttcaatctgcgaagccataatcaccttgcgaaaatccatcgccgaacggggtgatgaatctagcgtaatatcgtgctcgtcataccaggcgctgtaattatgctcgatacaaagatttagcgttttgccttcgcgatagccgcttagcataggaattaataccacgttagcagtcgcactattttcaaaagaggtagtgtgtaccatgccgatatatatccgccgcgatttcaaggttatccaggcgagatggccctcctccatacactgaaataatatgccttcaacgccgttagagtgggtgagccttttatacagatctttcctgcctgcactgtctaatcttgcgctgcccgcccagttggagcgataaaaacagaaaatcaccgcgaaggtcagcataataatcaccggcgcctggatccccaaaaaactccagttcatgaagtccatttgcaggtgatgataatgatcggccagcgagtaggatgtggcgttcataatagtcgacgtcaacaaaagtaccagccagatcagggccgtagccaccaacccctgcaatacaaaaatgcagccgtagagtgccactaaaaaatagacgtcccagccgaaggtgcgtttaattttaaagcgagtggacaggtcgcggctggtgtaccaataaccgcagaccatcaagaccataaaaacagccgttcccattttatactctccttagcgtttgcacgtggcgagcaaaatcctctttaacctctttgctgcaagtattgaccgaggccacgccgtcctcattgataataatgcgatccccttcttctatcgcctcttcaatatcgctctgactcatcacctgcaaaagagattccgggctggaaaaaatcgaaaataaaaatttgcgcattacgacctccatgaataatgcaataagcatggcaggcgagtgtctattcatctataagataattggcggtttcgatctgaaggggaaaataaaaagggaataccaaaaggtattcccgtaggactgtcgtcttgataaggcaggattattccagcggaccgcccaaaatggtttcacacattccgtcaagaatacgctcacccgtttcctcggtcaggtcgtgataccactgctcggtcagcgccatctctttaccgtgggtgacatcgcagcgttttcgggccttcagcaccaaatctttaacccgcggcgcgcgtttttcctgataacgcagcaacgcatcctcaatcccgagcgagtgggtttgcagcagattcgccagcaccacggcgtcctccatcgccgcacagccgccctgcccaatgtccggcgtggtgctgtgagcggcgtcacccagcagcgcaatgcgccctttcaccagggtcataaacggctcgatatcgtgaatttcgacgcgattagtggtctcaggattgatacctgcaatcagtttctgcaccggttccgcccagtcggcaaaatagcgctgtaggtcttcacgcaccgtgctgcggtcttgctcgagcccttttggcagagggacgtcgaagaagaagtaaaaacggttgccgcttaccggcatcagtgacacccgcttgccttgaccgacaaaggtggtccactggtcagccggggcgatgctttcatcaatttcaaccaacccgttccagttaacgtagccggcatagcggcgctcggtatcatagcccagcacgtgcttacgaacgacggaatgagtgccgtcggcggctatcaataaatcaccgtgggcagaggtgccgtcgtcaaaccaggcggtcacgccgtcggcggactcttccacgtgggtcacgcgtttgccaaactgcacgctgtcgcggccataggtgtcgagcagcatcgcctgtagctcagcgcgtgccaccgggtaaggctgctcgcctacgcgttggaccagcgggtccatgctgaaacgggtcatagtctggcccagcttgtaatcgttgtacgccatgtagcgcatgtgtccgcccaactcgcgcagcgcgtctttcatgccaagatagttaaggcatttgacgccgttaggccagatggagatggcggcaccgaccggtttgatctccttcaccgcctcgtatacggcagtctcgataccaaagcgcttcagcgcaatcgccgcacacgtcccgccaataccaccaccaatcacgacagctttcatgtttttctccttgaagtctctcaagagaaaagcaatttccgtaccagcttgaaaagaagctctgatttcacgcaaagcccttgtatacaatcgatgtatacaatgctcaatgaaacaatcgttacaaagacgggttcaacgcaccaacttaacgcacgaggatggggcattgaacgaatctggtgcacccttagcacaaaatagaaacaacccaattatttcatagggttaaattattactattgattttatgtttaatgtcattacaaatttgcaacaattaaacattaagaaataatcaatttttggcgcgcttcaccaatggcgattacccttacttttcttgaggagaacacccatatggagaaagtgaaatgctgacacgtcgtgatatgttgaaaatatcggccgcaggcgcggcaaccgtcggtctgaccagcgctctggtgagccaggcctcggcggaagaaacccgcaatctggctccccctacgacttaccaacccgctcataacgccacagcagtttataaatacaaatactcagacagcgtaaaacgcattctacccggtggatgggcacgcgaagccacggttaaacagttcccgatttcagaaggtattgccggtgtcgatatgacgctagcaccgggttccgttcgagaacttcactggcatgcgatcgccgccgagtgggcatttatgatttctggcaaggcacgcattaccatcatcgatccgcaaggcacttcggaagtggccgagtttggccctggcgacgtatggtatttccccaaaggctatggccactcgattcaggcactcgagggcggcgcgcattttattctgaccttcgataacggccacttctcggagtttggcactttcagtatcaccgactgggtggctcatacgccgaaagaagtgttgagtaaaagcaccaatcttcccgcctccattttctcaaaagccaaacagggagaagcctacatcgtcaccggacgcgttcctcctgccctgccactggcgcgcaacaacgggggccgagacgactccccgctcaaacaccactatccgctgatgagcgttcctccgttcttcgaaagcgaaaacggcagtattcacattgtttcatcaaaagagtttcccatttctcaaacgatgaccggcgtcatcgaaatcatgaaacccggcgcggtgagggagatgcattggcatccgaatgccaacgaatggcaatactatatttcaggcaaaggccgcatgacggtctttagttcacacggtcacgccgagacgcaagagtatgacgccaccgatgtaggctacgtgccgcagggctttgggcactatatcgagaatattggcgatgaggatctcaaggtgctggtggtgttggacaacggcatttatcaggatatttcgctgtcagactggctcgctaagaccccttccaacgtgcttgccgacaacttcctcaacggcgaggcagactgggaccctcgacctgcggaaaaactgtttatttctaaaggcgctcagtaactttccgtttgtgatttgatgcactcccaggcccggaatcgattcggggcctggggactcagtccaccgacgtcagaacccgacggagcgcagatagttgagacttgcggtcacgtctcacaggctgctctcgacgttgcgggggtcccgctcgatacgggtgtatcctgcctgaggacgtgctgtttcacttgattccgatctcgactggcgtgcaacgcttgaagaacatgtcgaaaccgtcacgcccctgtagttattgattacttgtcggcaaggttgtgcagagactctccgaacagccgaaaatgaaacatgccgtcgagagtctcgccgccgagcgaacgataaaatcgcgctgatcctgcgttacttttctccgacatccagtcgagacgcaggcattcccgctcaacggccaatcgagcgatatactgcattaagcgccttcccacgccttgcccacgctgagccgctgaaatatataactctttgatatacatctgccccgaatacctcggagacggataaaggatgttcacgcaggcgaacccaataatggcctcgtcttgcttaactcggataacaatcacgccagaatcaggtgcaaaaacacgtgactcgaggtaagtctccatctttgacggctcaataatgccagcaccaaagtagtgttcctccatctcggtaaaaatccccaccatgctcttccagtccgatttttcacacacggcaatcgataaactcatcctttgctccctgagttattactgatttagttctgattctttcctgaatatctctttaccacaaaacccctcacgctgctcaacgcttgacgtcacgcgctaagtaggtagactgggctacctactcaatgtgcaattaaaccaacaggtgacgctatgacggcaaaaaaacccgacgcaggagagagcgctcgagaccgcctcctcaatgccgcaagagtcttgttttacaacgatggcattgcaggaacgggcattgacgccgtggtaaaacgggcgggtgtcgcaagaaaaagcctctacaacaatttcgcctccaaggccgaattggtcgaaacctacctgcatctccgccatgacgagtggctgtcgttatatcaacatcgtctagaggcggcgaacagtccgctaaagggcgtactggcggtttttctcgcctatgaggaccatgcagaatacgcctatgaacgcggatttcgaggctgcggcctgcttaacgccgccgctgaactccccgccgacgcgccgggcagacaggccgtacgacgccacaaagagcaggtagagtccattctggccacgcatcttattgaactgactcggggcgatgaaaaacgggcaacgctgttggcgaagcacttggcctttctgctcgaaggtgcgatgtcgcgcgcgggccttgaaggcaatggtgactgcgttcgccaggcgcgcagcatggctataacgctgatggaggcactatgacaataagcagtgaccgccgatttggtggcatcacggcggtattgattgccgccatactgtggggaacaacgggtactgccgcgacctttgcccctcaggtcagcagcgtggccatcggttcagtcgccatgggcgtcggcggactgctgcaggcactcattgccttgaggagtttgctgcgttttcggcacgccctcggtcagcagtggcgattgttgatagtcggtgctctggcggtcgcggtctatccgctggcattttatgcctccatgcgcatggcgggcgtcactgtcggcacgctagtctcgattgggtcggccccgctgctttccgcgctgattgaatactgtctcgaagggcaacgcctttcgctgcgctggatggccggtgcatcgcttggcattgttggaatgttactgctgtgtttagccaaaaacaccgggcacggcgcgacgtccgagatgcttccaggcatcctgaccggtctgattgcgggtctcacctacgcgctgtattcctgggccgcacgccagctcatgcagcgcggcgtgccttccaaaacggcgatgggcgcaacctttggggtcggaggcatcctgctaatgccggtgcttttcgcgaccggagcgcctctcctggcgtcatggaataatgctgccgtcggggcctatatggcgctggtgccgatgttcatcggctacctgtgtttcggatttggcctggcgcgcattccggcaagcatggcgaccaccttgactctgctcgaaccggtcgttgccgccgttctcgcggtgtttattgtcggcgaaaggctcacgccccagggctggctcggcattgcgctggtcggtatttgcctgattttgattaccgctccggccaaaagaaattcaacgctttcagaaagccgggaaacggtttaagtaaggtattcctgttgcctggttcaacgttttttaagcgaattcatctcatgatacaataggcgctttgttgtttatggttacctattgcgttatgaatttattgataaaaaagcttaaaaccgcctgcgatcacttctggccgcaggccgttatatccagtcggcgggaacggatcgttggctgtgtcggggccgctttcggcattatcctgaccgaatggctatgccgattgtcagtgggtgaatctgtcccgtggttaatcgcgccgatgggagcctcggcggtactgatgtttgccgttccggccagcccgctggcgcagccatgggcggtcatcggcgggaatttactcgcctcagtggttggcgtaacctgtgcgctcgcaatccccgacgccagcgttgccgccgcgctggccgtggcgatttccatcgccctcatgttcccgcttcgctgtctgcatcccccagcggtgccgtcgccattaccgcggtgctcggtggcccgaccatcacccatttaggctatggttttgcactgtatccggtgctgctcaattcactgttgctgaccggtgccgcgctgttgttcaacaacacgatgaaacgccgttatccccattccgttcacagcgttcgttcatctgtccctccggccagcgtgacgccgctgacgcctgccccaacgcttagcatcacggccgcagaccttcaggccgcgctgaaagaaaacgctgaagtgctggatatcgatgaagactccctgcttgaggtcttttcccgcgccgagtcaattgcccgacgccggcacgcgatcgatgcctcagaaactcagacgcaacccacccggattgcctcttgagcgttttctgatgtcatcgttcacgttacggccttgagcctggcgacgcccggcggcaggtttgagttaattgagtggcgtcctgagggcaggatgctgctctgactcatgccggctcccatgaaggccatggatcgctaaatttgacccaaaccttgacccccatcgacatctcctcatcgctcagcaggcaatcgtccagtttggcgcgcagacccagttcatccatatcgataccgatgaacaccagctcctgacgtgcatcaccgacgccgtctaaccaatattcgaggataaatgccagcgtctcagagtcctcaggccaacgttctttcggcacactcgcccaccacataccggcattgtcctgccgcgatacgccaccggcctgcgaccattgtccggcaaaggtcggcctgctcgccagccagaagaagcctttcgaacggacgacgccgggcaggccatcgttagccaggtcggcaaaacgctgcggatgaaatggacggcgagcacgatagacgaaatgcgtaatgccatactcttcggtttctggtgtgtgctctccgcgtaactccttaagccagccaggagcctgagcagcctgttcgaaatcaaaaagcccggtgttaagcaccttgtctaacgccacctgcccgaaggaggcgacctcaatgttggcgcgcggattaagactgtgcagaatggcatacagcctgtcctgccgttggacgctgatgaggtcaaccttgttgagcacgatgacatcacagaactcaacctgctcaatcagcaaatcgaccaccgtgcgatcgtcaaactcaccgagcgactcccctctttcccgcaggcgggtgtcagactcgtagtcattaagaaagttaaaggcatcgaccaccgtgaccatggtgtcgagccgggcaaaggttgacaggctttgcccgtcatcatcggtgaaggtaaaggtctcggcgaccggtaacggctctgagataccggtcgattcaataaccagatggtcgaatcgtccggctttcgccaacctgtcgacctcaatcagtaagtcttcgcgcagcgtgcagcagatacagccattgctcatttctaccagcttttcatcggtgcgcgacagctcggcaccgccttctcgcaccagcgccgcgtcaatattgacctctgacatgtcgttaacgatgactgcgacacgcagcccctgacgattattaaggatatggttcagtaacgtggttttacctgcgcctaaaaaaccggaaagcacggtgaccggcaggcgcgggtcatgaaggaaatttgaagatggtgcaatgctctctgtcatagcctgacctctgaaaaggatgccttaatagaattatttgttatgttataacataacaaattaaaatcaagcttatcctgaccggacatgtggctaaccaggaaaaaaatcagccgttaataggtgatgacaatcacaaatctacatttatattcatcttgaagggtcacaaaaatatcgaccctctaaattaattttaattaaaatcaaatgattaaaccaaaaaataatcatttatttcatttttaatatcaattgaaattttcatttctttggcatagcctctctcccgttgaattgatcattgagccactgcgctacttcttacgggagttgtaaaaatgagccataccctgacgccagaaattttgcttcagcaggaagctgaacaccgttttgacaatctggattttgatttcacttctgcatgggagattggcagcgcaattcgtcagcgtgcgctggagtcagatgcgcccgtttcgattgaggtttttgctttcggccagccgctgtttctgaccgccttaccgggttcgagtgccgataacctggaatggatgaaacgtaaaagaaataccgtgctgcgcctcgcccactcctccctttatgcggggctcaactatgagctgactggcgaacgcatggagcaccacgcctttatcaatcaggcggaatactgcgaccacggcggcagctttccgttattgacccgagctggcgcggtattcggtgccgttagcgtaagcggcctgccgtcgcaggatgaccatgcgctggtggtttacggcatcagccattacctgaaacacaagaagtaactcgttgccaaggacatcatgatgaacagcgattttgtgaaactggccatagccccatcggctggaccaatgacgacatgcctgaactgggcgatgaaaacagcttccagcagtgtatcagcgagatggcgctcgccgggttcaagggcagtgaggttggcagtaaatatcctcgcagcccggcgttgcttaaaccggcactggaactgcgtgggctgcaaatctgcaacgcctggttcagcaccttctttgccgatggtcgtcgcgaacagacggtcgaagaattcaagcaaacgctggagttcctgcacagcatgggcgcgaaggtgattggctgctcggagcaaagcggcagtattcagggcctgcctcagccggtgtatggcgagaaaattatctttaacgacttacagtggcagcgcgtagccgaaggctacaaccttattgccgagctggcggctgaaaaagggatgtcggtttgtctgcatcatcatatgggaaccggtattcagacgccggcagaaattgaccgcttcatggaggttgtgagccacaacgttttcctgctctatgatacggggcatgtttatgcgtctgagctaactcagcaggcggtagtgaacgtgctggaaaaacatctcgcacgcatccgtcacgtgcatctgaaagactgccgggacgaggtattaaggcaggttaaagacaaacagcagtcctttatgaccggcgttcgtcagggcatgtttaccgtgccgggtgacggcgtgattgactttgcgccggtgtttgaactgctcgataaaagcgggtatcgcggctggatggtggtcgaggccgaacaggatccgtcgaaggccaacccgctggaatatgcccttaaagcacggaagtttattcgcgaccagaccggcctctaaaaccctaggtattttattaattatctcacgcgccgcagggtcattcttgcggcgctttgctaaagcactctcccaccaagacagtcaagaccctcgcctaactgcacggggaagaggcgggtcgaagcctacctggcaaaggcagcctgtttacgttagtgctgccgcgccactgacggtacgattaagcgaaaacggttctcagatgctgtttcaggcgcagcacgtcgctgtcgacagagggggatttcagcacgtcatagcaggaaaatgacggcaccacctcaacgccgcaaaaccggtagttagcggtattgtgggcgaaaacgtcatcgacagatttaccggaaaacagcgcctgatgcgggttattgaacgccgcttcaggcgcattccaggtcagtgacagcatgtattttttgccctgcatcttgccaccgctgccgtactggcgttcagggtcctgtcttgttcgaccgtcatcggccaaaaagctctgctgcatcaggcctgcagtaaacacttcatcaacatattttttgtagatccaagggttaccaaaccagtaaaccggcgactgggtgataataatgtcggcccagagatgtttctgcacctcttcattaatttcataaccctggtcaatgtgcgtgtgctgtacctcataacccagactgtgcatctctgcggctagggtatccaccagcagcttgttcaaactgccggaagacatgccttcgtaaaactggtgcgcattgacgatcagtacatttttcatgttttcttcctgtgcgtttattaatgagtccggcgtcattccgggctgatacacaagaagatacgctacccacactctgatgattagaggggagaatgcgcataaacttagaaatgcgacttctgaatcgaggcagcaggcctgactcagccatgcggcctgcagcgcagcctgtcgagaagcagtgaaaatgcgggagtgtgctgctttctgctgggataataaagatgatagccgggtaaaggctcacaccagtcctccagcacgcgcaccaaccgaccttctgccacatgctcaacaatttggctttcatagatgtagaccagccccagtcccttgagcgcggcgtcttcaagcatattgctgtcgttaactatcagcgcgccgtccaccttaacgtccagtgcgctctcccctttcggaactcccaggcgaagaggccccggcggtcttctgccgatagcgtatacagcgatgctcgcccagttctctcggcgtttgcggtggcgcatagcgggcaaaatagtccggggtagcgaccaccgccatgcgaatatccgggccgactctcaccgccaccatgtctttctcgacctgttcaccgaagcgaattcccgcgtcaaagcgttcggcgacgatatccgccagcccttcgttaacgtcgatttcaaccgtgatgtcaggatattcagccataaacgccgacagcgcgggaaagagtacggtctgcgcggcatgtttaaaggtggtgatgcgcagattacccgctggccgattgtgcaatgtcttcagggtatctatctgattattgatgctttccagtgccggtttaagcgtttgaaaaaaacgctccccggcgtcggtcagcgagaggctgcgggtcgttcgcgagataagccgcgtttcaagccgctgttcgagcattctcaccgcgtagctcaacgccgactgagaaagtcccagttttgctgccgcacgcgtgaaactgccctcttctgcgacggcaataaacgccgcgatatcactaaaatcgccgtttctcattcactctctcttaatcaaaatcgcaccttagcgcaggctacccgttgcatagcccccgtccagcctctgtcttgccgagtctgaataaagccctggcaccggcaatttttttaaacagcatgttggctcgttcgccccgccacattccaatattctttctttttttctggtacttagctttatccttctgccgaaaatagatagccggaattgatctaaccggcccgtctagctgtgacaggatggttatccagcgcctatgcgccacatcattcatgaggagtgcctatgtcaactattgaagtttcccctcaggccgccgacgtgcgggttaattcaccggaaccgctggcccctcttccgcgccctgccacgccagcgcaggtgattaaaaacgatgccgaggctattgccgtcgccgagcgcctggcaaaggtgtttgctgagggtgcggcacgccgagacagagagggactgctgccgattgccgagcttgatgtcttctcgcaaagcgggctatggggcatcaacgtgcctaaggcctacggcggtgccgaggtgtcttacgttacgctagcgcgggtgattgccattatctccgccgccgactctgcgctgggacagatcccgcagaatcatcttgccggcgtagcgcatttgatagccgacggcagcgaggaacagaaaaatcggctgctggcgggcatattgcaagggcttcgctggggcaacgcgttttcggaaaaagggtctaaaacagtcggcgattttaagaccaccctgcgccgtgagaacggacaactggtggtcaacggtgagaaattttacgccactggcgcactgttggcgcatctggtgcacaccgtagcggtcgatgaagaggggcacgtgcagctggttatcctggagcgcgacgccgaaggcctgaccgtgattaacaactggtcgagtttcgggcagcgcaccaccgcctcgggaactgtcctgcttgacaacgtgcgcaccacgccggaaaacgttattccggtctggcaagcgttcgaccggcctaccgccgccggtccgatatcacagattattcaggccgccgtcgatgcgggcatcgcacgcggcactatcgccgacacgctggcgttcgtgaaggagaaatcccgcccgtggatagacagcgggcaagagaaggcctcggacgatgtgtttacccttgccgccatcggcgacctgcaaatccgcctgcacgcggccgaagcgctgctgtggcgcgccggtgagtttatcgatctcgcgctaaaaacgccgaatgaggagacggtggccgcagcgactatcgccaccgctgaagcaaaagtcctgaccaccgagattgcgattctggcaggcaataaactgtttgaactggcgggaacccgttctacgctggccgaatacaacctcgaccgccactggcgtaatgcacgtactcataccctgcacgacccagtgcgctggaaatatttccacgttggaaactactatctcaacggcgtcaatccccgcgccacgcctggagctaacgcctgtctcccgccctctcgggcgggattttatcccctttaacgtctaaagcgcgccgccgggtgcgttgacggcaatcggtcattgttgaacagttttgcccttaacgaacccggctgatactcagtcttgtaacgaccgcgccgctgaagctcgggtaccaccagatcgataaaatcgatatagctctgtggatttacgatgcgcgtcaggttaaagccgtcgataccgctttcatcgacccacttcagtagctcatcggccacctgcgaggggttgccgacaatcagtgaatagcgtccgcccatcgcgtgctgttccagcagctgacgacgcgtccagccgctgtaggccttgctaaccgactcgatggcgcgcgtcggcccgctctgaatcggttcatcgagcccgaactgcgaaaggtcgatgccggtggaactggagaaatgcgcaatgcctgcctccgggctggcgtaacgaagatactcctgctgcttctccttcgcttcacgctcggtgggtgcgactattaccgaaacgcccataaagaccttgaggcagtcgggatctcggcccgcgtcctgtgcggccttgcgcagcttgtccacctgcgcccgcgttgcctgcggcgtactgccgctgacgaaggtgcattcggcgtgccgggcggcaaactgcaggccgcgcgccgagctgcccgcctgaaacagcagcggcgtgcgctgcggtgaaggcgacgaaaggtggtatccctcaacctgataaaactcgccccgatggtgaaccggatgaattttaccgctgtcggcgtacaggcgacgctgcttgtcggccacgaccgcatcgtcttcccagcttccctcccacagctgatagctcacatcaaggaactcgtcggcctgatcgtagcggcgatcgtggctcagcagctcggtttgccccatcgctcgcgcggcgctgtcgagataaccggtcacgatgttccagcccacgcggccgtcggtaagatggtcgagcgtcgaaaaccggcgggcaaacgggtaaggcgcctcatagctgagattggcggtcacgccaaaacccagatgttcggtcacgctcgccatcgccgaaaccagcatcagagggtcgttaaccggtagctgaatagactctttggcggtcagggcaatcccctgttgataaacgtcgtaaacccgagaatatcggcgataaacagcccgtcaaacagcccgcgctctaacgttttggctaaatccaaccagtatttcaatgaggtaaattcggtggaacggtcctgagggtgcgtccacatgccgtggtggatgtgccccacacagttcatattgaaggcattcagcagcaccttcttgcgtggctggctcatattgtccctctacgcggcggcaaaacgccgtttaagacatagttgccgatgaccggatatttccagcgcaccgggtcatgcagcgtgtgcgtacgcgcattgcgccagtggcggtcaagattgtgctcacgcagcgctgaacgcgttcctgaaagctcaaacagcaggcttcccgcctcaagagagacctcggtggtccaggcccgcaccaccgcaacttgtaccgatgcctcggcgacggtggacgcattcgggtcacgctgtgcgatatcaaccgcctctcccgcctcctgtaatagcgcatccccgcctgcaagcgtgccgcaagctgacccacgcggtcgagtgttagcggatcgtcgctcgcgcggtccagaccagagtccggccacggacgggagcgggtattaataaaattcagcatgtcgttgaaggcagcacgagcgataccctgatcgatagcggcatgcataatctgcgcaaatggcccgacggtagtcggccgctcaaaggcgctgtaaaacggcacaatgtcatcagcattcaccgagacctcttcaaacaccaccgtgccgctgccggtggtgcgctgaccaaagccagaccagtcgtcgatgacgttgacgccgtcctgatgccggggaacaaacaccagttgctctttgccctcggcgtcgcgcgctgcggtaggtatccggtcggcaaacagcgcgccggtggcgtagaattttctgccatgcagcagatattggccgccgttgggcaacaccgccgtgctgcgctgatgcgccgagggggacgagaactcagccagcgcattgccgagatgcacgcccgccaacacctcgcgataaagccgctgctgctgtgcctcactgccgttgatgcgtaaaacttcgagagcataaaaatggttttgtggcacctggccaatagcgccgtcggcctcgcttaatatcgcaataacctcggccacgactgccgcagagacctctgcgccgccaacgtgtttcggcacggttatcccgcccagaccggaggcaaacagagcttcgagcggtttgaagggcagcactctttctcggtcacgctcggcggcgtcgacgcgaaacgctaacgccagttctcgggcaacgctcagcgcctgctgcgccgaagtgataatgctggcggggtttttagggctaacctggcttattgtcatcgtggtgtccttatatccaggcgtgtcgcacagggaaaataccgttaaggtaataattgccgatggcgtgattcttccagcgcaccgggtcgtgcagcgtgtgtgtccgcgcgttgcgccagtggcggtccagtccgtactggctaagcgttgccctgctgccgccccactccagcaacttttcgctcgccttgagcgcaatcgctgtggtcaacactttggcttcggcaacggcgatagaagcgcgggccgccgtggcggcatcgaagtgggcagggttaatctcgtccagaaccctggcggcacgtttaagcagcgcctcagccgccagcagttcaacgtaaatgcggcccacgtcggcctgcagctgagtgtcatcggcgttacggtcgacgccagcgtctatccagggcctcgactgctcaagaataaatttacgagcgtcttcaaacgcaccgcgcgcgataccggcgtcgatggccgcctgaatcagctgcgaaaccggtccgcgtagtgaaggtttatcggtggcgggcacttcgaccagccatttcggatcgaccaacacctcgtgcagacgcaccgtgccgctggcggtggttcgttgccctacgccggaccagtcgtcgataatctcgagaccctcggccggacgcggaataaacgccagcaccgccttgccgtggtcgtctatcgcggtagtcaccacgatgtgagcaaacagtgcgccagtggagtaaaacttctcgccggtcaggcgtggcccgtcgggagactgacgcaggcgagccagtacctcacgggtatgccgcgtattcttttccgggccgccgttgccgaaacgatgcccagtcaccaccttgttgaacaaggcggctttttgctcatgcgacgcctcatcgcgcagatattgaatgaggccaaaatggttctgcggaatctgtcccagagagggatctgcggcggaaatcagccggaaaacctctgccacggtaagataagacaatccgccgccgccaaactcgcgcggcacggagatactgcccagccccagacggctgaacaacgacagcgcctccagcggataaaggcgttcacggtcgcgcactaccgcgtcaacggcagcaagttcggcgaccgcgcgggccgccttaagcgcctgccgttcgtcggtgattaccgccgccgcttcgggggcgcgccaaaggttttcttccttgatggtcattaggctctcctcactcaccgttgccaatttgccaaataaacgtcggttcatttccgttaacctcccaatcgccgacgttacgcgatttatagataaccggattgtgggaagacaccgtacgtgcgtttcgccagtggcggtctagtgccttagaagtacgcgtatcggatgcaccgagtgcgttaaacagctcggtggcggcacgcgtcaccagatcggtggcaatcacctgcgctttggcagagtcgacctcggcctttacgttagcctgctgaattgccgcttcgtcgccgctgtcgtgcagctcataagcctgttgcagtgcctgagtcgcctgctgaacggtggcatcaaccgcataggcccagctggaaatctgcccgacgacctgcaacacctgcacgtcctgcttcaccaggttggcgttgctgtggctgtagatgcgcttgcggttggcgacgccctgcgccacgtcgcgggtgatcgcacggccaatacccgccagcgttgacagcaacacgtgctgataaaacgccgtctgataacggaaacgttcgctgaagtcatagacgtgtggggcctccaccttcgcctgctcaaaacgcgtggtgccgctgccggtcaggcgctgaccgaaaccgtcccagtcgtcctcacgctgtacgcccgtctgatgggtgttcaccagcgcaatcacgtcacgaccgttgtcaccgcgctgggcgtagacgtcaatccagtcggcatacagcgtgccggtgctgtaaaacttgtggccgttgagcgtccagccgttttcgctcggtgacaccttggtgaccacttcaccgagcttgagattgccgatttcggtccaaccgctgcccaccagctcaccgtcggtaaagcggcggaaccagcgttttcgctcttcgctgtcgggctgattaagtctgtcttccacgaaggcaaaatgcgcccgcagcgcctgcggcaggttggaatccgcctcggcaagttcggtcagcagttgaaacagctgcggcaacgtagcgccgaaaccaccctcttcgacaggaatacgcagcgtgccgaagccagcctcttttagccagcggatcggctctacggcaagctggcggtccagctcacgctcgacggcccttcggcgatgcgggtaaatatcggacggaaacgggccgccagggtttgatagtcagtcgtcagttgcttaggcatggtgttctccgttttcagaatggtcatcaatatcgcgacgagtcggctcaaagcggactaccagcaagaatacgatgggcaggatggcgctcagggagacaatccagaacatgttggtaccgaatgaagcctgaaggatcggcagaataaacagcgccaaagcactgccgatgcccgacagcgagcggctaaaacccacgccggtcgcgcgaacgtgagtaggataagacagcgccggatagatcattatctgcgcgcccggaccaaagccttcggcaaacagccacaggccgagcatcagaatggcgaagatgacgccaaccagcgccgtcggatgaccaatcagcgccagtgaaatcagggcgataaactgcagggcaaaaccggcaatcgccacgtggcgcgacgggaatttccacgccagacgcatgccgagcagcccgccggtaaaggcgaacagcgcattcaggccagcgaggcagagatggtttcaaacacgcccgcgccgaggaactgcgccaaaattgacggcaggaagaaagcaatcgcggtgtattcaaacgagacacagacgttcatcacgccggagaccaaagtccgttcacggtaaggcttctggaaaagcacgcggaagctgaccttcggcggcgctttcttctgttcctgagcgacagatttatcttcatgagcggtgataccgtaagagtcgcgcaggatacgtgcagcaccgctgaggtcaccctgattggccgcccacagcggggattcgttcataaatttactgcgcacggcaataatcagcagtgcaggcaccgcgccgaacagcagcgacgcacgccacagccagtcgatgtgctcctttggcagcacaaaatagaggccaaaaatgatcaggaagcacaccgacgaggccgcgtaccacatcgggcaccaggcggccagccttgaggctttattggctttaccggtaaatttagagaactcggccagataggccatcgctaccggcaggtcgatacctaccccgacccccatcaggaagcgcgcgccaatcagcacccagacgttaggtgccagaccggcagcgatcgccgataccacgaagaacagcatatcggccatgaataccgaataacggccgtacttatcggttaaccaaccgcccagcaggttaccaacgatagtgccaatcatgatggaagaagtgaccaggccggtcagcgtcggcgtaaggccgaagtctttgaccacatcatcgatgccgtatgacagcgtggtcagatcataggcatcaagaaacaccccgcccagcgcaaggaaaacgataaagcgcgcgtaggtattttttttcgaactgttgttaatcagtttagcgacgtcgccaaccgatcctatcggtgttgaatgggacggcggcgaagcaacgccgtcgtcaatgttaatcgtgctcatagaaccctcgtgttttttattgtgcagaccaatgtcgataacagtggcaggtgataacacgagttataaagtgcaaagaggggaataacaaacaacaaatatggataataaattcaatattatcaataagttactgagttattttacaggcagcgcaaaaaccgggttagcgttaagcgaacccggtcaatgacccgaaatgctgggacttattgtgcggaaacaggcactaaaacgtctctcaccagagggtcatgggtctcttttagccactgctgcacgcgagggtcggcgaaagccttcttcagcttgacgatattttcgtcatccagataaggtgtgccgatcaccagctgcgaggcgaaggttttcggtgcaggagggaacagaatgcctttctcgcgtgggactttaccggcgtcaaactgcgaaacgtagccgatggcggcatccacagaattcagtgcccgcggcatggtcagcaaatccaactctttgaatacaaagtgatgcggattttctttaatgtccgacagcttggcggtgcgcggttcaacgttagggtctagaccaatcaggccaattcgctgcaacagccacagcgcctgcccctgattcgcgccgtcgttaggcacgacgatcaccgcccctgaggtaaatccgcaatcgaatgatatttatctgagtaaatgccaaacgcccattggaacagcggctcggtcggggtaagggcaaacttgttggcatcgaccacctgtttcagccaccactgatgctgataaaccgttgcagcatactgcccgtctgctaccgccctgtcggcctgcacgggatcctgaagcccttcggcaatgatcttgatgccatagtccggcgcaatattttgcgcgacgtactcgattagcttctgttcaccggccatcgcaggctcgaagtgcaccttaagcgtggtgccgaaggtcaccgcgtgacgctgttgcgaagcaaaatgccagcccacggcggcaacaacgataaccacaaccccgagcacgatccacggccacgtttttttctttttaatttcaaaatcctgctgcgtcatgatgaatgtgtaccctttgcgtgttgaagagaggcaaccagttgatcgccaataaattggatcagttgaatggtgacaataagcacaataatggtggctatcatgatgtggttatcgaagcgctgatagccgtaaaccacggccagatagccgataccgcccgcgccgatggtgcccgcgatggccgaatattcaatcatggaaatcaggttcagcacgatacccgccacaatcgcaggcagcgcctcgctgatttgtgcccgggtgattatctgccacgtagagcctcccgacaccagcccgaccgccgtgacgtcggccgggagttcgcgcagtgcgttctccaccagacgcgcaaagaacggcgtccccgcgacaatcatcgggatcaccgccgcaggcgtgccgatggtggtaccggtgagccagaaggtgaacgggataatcgccgccatcagtaccagaaagggcagcgaacggcccatattgaccagccagctgagggcatgattcaggctggcgtggggaaacagtccgcgcttcgaagtgttgaacaacaccacgccgagcaaaccgccgagcgtaaccacaaacagcatcacgatgccgaccatcagccaggtttgcaggtaggccggcaccatcagagtatgaatctggctccacggcgtgtcctgactcagcacgtctaccggtttcataccgcctcctgtagcgcggcgcgagtctgaataatttctgaattgatgccaagtcgatacagctgttgaatcagcgtctgggtgtcgagcggacgctgagtaaagcgcaccgcgacctgcatccttcccgccagccgttcaccgaccttctcgacgtgcgcggccaatacgtcaacctgcaacggatactgctggctgagctggcttatccagtcggtcgccaacggccggtcaccgtagctcagttgcagcaccagctccccgtcggcctctgtcgggcgcagtgggaaaagctgttggcccagacgcgactccggttgcgccagcaggtgctggagcgacccctgctgcaacagcctgccatcgcgaatttcggccaccgcgtcggccgcgctgcgcacgacgtccatctcgtgcgttatcaacacaatcgccagcccaaagtggtcgcgcagctgtttcagcaggctcagaatcgacgcagtggactcgggatcgagccccgaggtcgcctcgtccgccagcaacaccgacggcttgagcgccagcgcacgggcgatgcccacccgctgacgctgaccgccggaaagctgggagggaaaatggtgcgccttgtcctcaaggccgacgctttcgagcagctggccgacgtgttttttgatgtcgcgcggcacgacgccaagccactcaagcggcagtgcgatattgtcccaggcggttttacgttgcagcagcgccgaggactgaaaaaccgtgcctatcgcgcgacgttcacggcgcagcgcctcgccagacagccgagacaggtctttaccgttaacgcgaatgctgcctgacgtcggtttttccaacaggctgatgcactttgccagcgtggatttccccgcaccgctcggtccgaccacggcggttatcgaggccgaaggcacggtgagagaaatcccttttagcacctcgatgtttttgcccttggccgccggtgccggatagtgcttatgcagattatcgatttcaatcatgattccgccgctccctcaggctgggcttgtttctcggcgcggtgacgataaccggtgccggggtgcggaacctgcaaacgcggcccctgattgaacagcttttcgcgcagcgtcccttgctgatagtccttcttgtaggcgccgcgcttttgcaactcaggaaccagcaggtccacaacgtcggtgaaagtttcgtgggtcacggcataagccagattgaagccgtcgacgtctgtctcttcgacccagctttgcagctcgtcggccaccgtctcggcgctgccgacgatgagcggaccaaaaccgccgatgccgacccagtcggccagcccctgcaccgtccactgacggtttggatcagcggtcgagaaagtttctaccgccgactgaatggcgttggtgtgcaagtgtttcagcacctggtcgggttgatattgaccaaagtcgatgcccgtccagcccgaaatcagcgccaatgccccctcatagctgacatagcttttgtattcctgccatttggcctgcgcctggaggtcggtctcgccgacgatcaccgtttgcagattgaaaatgagaattttgcgcggatctcgtcccgcttcggcggcgcggcggcggatatcggcgacggtcttcttcagcaataccttggacggtacggccacgaacacgcattcggcatgctcggcggcaaactgtttgccacggctcgacgcgcccgcctgatagagcaccggcgtgcgctgtggcgagggttcgcacaggtgaataccgggaacctggaagaaggtgccctgatggttaataggatgaattttgctcggatcgctgaagatgccgcgctcgcggtcgcgcagcaccgcgccctcctcccagctgccttcgagcagcttgtaaaccacctgcaaatattcgtcggcgtagtcgtagcgcgcatcgtgatcggtctgtgccttatagccgatattgcgtgcgccgctctcaagataagaggtcacgatattccagcccacccggcctttggtcagatggtccagcgtcgaaagacggcgtgcaaaaggataaggatgctcaaacgacagcgacgccgtcagaccaaatccaagatgttcggtgaccagcgccatcggcgtaataagcgccagcggatcgttaaccggtacctgcgtcgcattacgaattgccgcgtcgttgttgccgttgagcacgtcatacacgcccagcacgtcggcgataaaaaggccgtcaaacttgccgcgttcgagcaggcgagcgagatcggtccaatattccaaatccttgtactgccatgaacgatcgcgcggatgggcccagagaccgggagactggtggccaacacagttcatatcaaaagcgtttaggcgaatttcacgctgcgatgacatcgtgttttgtgaagataaattgttttgtgaagacagatctttttgtgaagacatagcgtactccctgggcgagagaggcagcgtccgctgcctgaatcagccgtgattgtggtcattaaaatcagaaaaaaatcagaaaaataagcaactgctcagagggttttcagtgaagccggacatcgtcccgcctgaggaaatgaggccgtgtctaacagactacgcgccagcgtttcggcgtgttctgcaacctgcggcaggcccatcagctcaccaaagcggccacgcgcggccgggccgaccacgtataaatgcgggttggcgttgccgtgaatattcagcgtctgtgactgggcgttcacccagatgcccagcgccagcggatcggcctgaatggctccctgcgtcgccagttggctaaggaacgcatcgctgctcagcagcgcgccatgcgcaggaccggtggtaacaataattttatccaccgtcagagactcaggcgtggcaccgcgcggctgtagcgtcagcgtgattcgcccttggttgtcttcggccttgaccaaccgcgcggccttcaccgtcaatcgtccgtcgtcctgaagctgttccagcaccgcactgacctgcggcgcgatgcggtagcggtgcacgtcccaccatggacgaagatggcgcaggaaacgctgttgctctttcagcgaaaactgctgccacaggcgctggccgttgctgcgaatatcatccagcaccagctgccacggcagattcagcgcggcggcggctttaatttcatcacggacacgccgtagccaaccaagcgcggtggcagcctgcggacgcgaatagtccagcgcacgcggcgcaaactgtccgctgaggttcggacgcggcagctgcccacgacgcgaaaatgctgtgatttcaccgcgatgcccctgccgatgcagagaggccaccacgtcagacatggtgagcccgctgccgataatcgccacgcggtccgtgggcacgacgcccgccagcgcgtcaacccgccacgggttagcgaccagcgcgcgcgaatgcgttaaatgtttcagcaacgaaggcaatgccggaggcgggtggctgatggccagcaccacgtcatccgcccgatagccttggcctgaggcggtgatcaccgcgccgttttccaatgcaacggcgcggtcacgcacgtggtgcagtttcaccgctgaggacgcggcggcaaggcggtaaagctcgttgaggtaggcaccaaactgggcgcgctgcggatacagcttgccgtcgtgccagcggacctctgcgtcaatttgacaggcaggcgaggcacggaaccagcggtcgaaatcaccctcttcggcggccgaaagatgcatgcgttcagccggaacgttgatgcggtgcgaagggtcacgggtgccataggcaacgccgcgtcccaactgctcgcgcggttcgataaccgtcaccttcaggccagcgtggccgctgcgcgcaagatgaatcgccagcgcggtgccggaaaaaccgccgccgacgataacgatatgtcgctcagccatgactcagctccggctgttgctgacgctcaagctcgcgcaccagcggaataacctcacggccaaagaactccacctcttcctgaaaatgcaggaagcccagcagcatcaggctcacaccggcttttttcagcgcaataatacgttcagcaatctggcgcggcgtgccgatcagattggttttgaagccgtcattgtactgcaccaggtcttcgagggtagatttcgcccagttgccctcaccttccggcgacgcgctacctgcgtttttcgcctcgtgctggaagccttttaccgcgtcaggattggcctgcgcgacgatgtcttgcagcacttgctgcgcctgttgttccgtatcgcgggcaatcacaaagccgttgacgccaatcttcacctgatgctggttggcggccgccttgagctgaatatcctcaacctgctggcgaataccttcaacgctgttgccgttagtgaagtaccagtcggaaacgcgggccgccatgtcacgtgccgcgcgagagctgccgccctggaaaatctccggcagcggattaagcggcttcggtttcatcacatagtcgcgaaaacggtagaaatcaccggcgaagttaaagctctcctcctgccagataccgcgcaggcagcggatgaactcttcagaacgcagatatcgctcctcgtggtccagccaaggctcaccgatggccttgaactcgccgcgaaaccagccgctgacgatattcaccgcgatgcgggcgttggtcagatggctaatagtggctatttgcttggccgccagcgtcggattccacggccccggcagcagcgcggcaatcaccttgagtttctcggtcgcgcccagcaggccgtgggagaaactgaccgactcatgctggttgtctgcgccataaccggcggtgaaacgaatctgcgtcagcgcgtagtcgaacccggcgcgctcggcaatctgtgccagtttgcggttgtactcgaagtcccagccggtgcgttgatcaatattgctgatgaccagcccgccggagacgttaggcacccaataggcaaactgaatcggttgttcgagagaagattggctcatgggattttccttagcttgcgctagtctgcttcacgggacgacggtcgccgccgatggtttcgccaaaaggtccggtattcacggtgcgctgacgcttttcggcgttcgaggccaacggcagcagcggcatcacaagctcggcaaagcgatgcgcctcttcgaggtgcggatagccggagaaaataaagttttcgatgcccagcgcctgatattcgcgaatgcgttccgcaacctgctgcggattgcccaccaaggcggtaccggcaccgccgcgcaccagccccacgcccgcccagagattcggcccaatgcgcagtgaatcgcgtgaaccgccgtgcagtgcactcatgcgggcctgtccggtggagtccatccgcgcgaagattttctgcgcggcggcaatcgtgtcttcatccagatgcgcgataagtcggtcggcggcggcccaggcctcctcctcggtttcacgcacgatcacgtgcagacggatcccgtagctgagtgtacgaccacgctcttcggcacgctggcgcaccacggccagtttctcggccacctgctccaccggctcgccccaggtgagataggtatcaatctgattggccgccacgtcgatagcttcttcggaagagccgccgaaatagagcggtggaccgtcctgctggaccggagggaacagcacctcggcgccttccacccgaatatgctcgccgtggaaatcgaccttttcgcccttcagcaggcgtgaatacacctcaagaaactctttcgttaccttgtagcgctcgccgtggctgaggaaaatgccgtcgcctttgttctcaacgggatcgccgccggtcaccacgttaatcagcaatcgtccctcggaaagccggtcaagcgtggccgccatgcgtgccgccagtgtaggcggctggaggcctgggcgcaccgccaccagataacgcagctttttggtgataggtgccagcgcggaggcgaccagccaggaatcttcacagctttttccggtcgggatcagcacgccgtagtagccgagattatcggcggcgagtgccacctgttgcaggtaaggcaagtcgaccgggcggccgccttcggtggtgccaagataacggccgtctccgtgggtcggcaaaaaccagaatacgttgatgttttcctgcgctgattcactcattatccatttcctatataacgatatctgaatttattagatataaattcacggtttggttataaatagaattgcaggaagtgtgccacttcgcagaaaatttatttttattacatttcaattatttataaacattccctctcgaataatttgctgcatttgcaacaatcgctgtgcctgcgctgctgcaaatgcagcaatttgacttttgggcccctcgccgaaccgctttcagggcggtattgtttgcttccctctcacctcaggagtgaatgatgcagaatcatggcccaacgcttatcgatcccgcctcgattgcctttcaaagcgtgctcgaccgcctcgcgccaaccgacgccacggtattgatagtcggtgaaaccggtaccggtaaagagggagttgctcgctatttacatcatcacagcccgcgtcgacagcagccgtttctggcggtgaactgcggcgcactgaccgaaagtctggcggagtcggagctgttcgggcatgagaaaggcgcttttaccggcgcacgcgagcgccatcagggctggtttgaggccgccgagggcggcacgctgctgctggatgagattggcgagctgagtctgccgctacaggtaaaactgctgcgcgtgttacaggagcgcgaagtcacgcgggtcgggtcacatcgcgccgtaaaagtgaatgtgcgggtcattgccgccacccacgtcgacctggcgcaggccattcgcgagcgccgttttcgagaggacctttattatcgtctcaacgtggcggccgtaaccctgccgcctttgcgccaacgccaagaagacattccctgctggccgaacactttctgcgcctctatgcacgacgtctgggtcgccctcagctgcgcatgagcgaggagaccgtcgccacgctgatggagtacccctggccgggcaacattcgtgagttggaaaatactctgcacaacgcggtgctgctgagcaaagagccgattattagcccgcgtcagctgcgccttagcccgctcggtgcagattcactgccgctgggtgaggccgcgctcgacgagtttatgcgccagcagctcgagagcggtgaaacgcagatttaccagcgggttattgacgcgctggtgcgcaacgctttcgaaatcagcggcagcaatcagctgcaaaccgctaccctactgggcgtcagccgcaatacgctgcgtacccatctgggtcatctggggctgattaaaccgcgtcgcagtctcgccggaagcggacaacgcactcacgcacatcgcccgccacacgagcgggaactgcgcatcggctatcagagatttggtaatctggggatcctcaaggcacgtcaatcgcttgaggcgcagtttgccgacagcggcgtcagcgtgctgtggagtgaattccccgcgggaccgcagctgctgcacgcgctgagcaacggcgagatagattttggtaccacgggtgaagtgccgccgctgtttgcccaagccaacgataaccgggtgctttacgtggcatgggagcctgcggccccccaaagcgtggcgctgctggtcgccaacgacagtccgattaaagacatcgcgagtctgcgcggtaaacgtatcgcggtgaataaaggttccaacgtgcactacctgctggtgcaaatccttgacgaggtcggactgaccctggatgacgtgcgcgtggtttactctccgccaaaatatccgctgacgccgagtgaccaccatgccgtcgatgcctggatgatgtgggatccgctactgagcgacgccgagcgctgcgggcagctgcgagtgattgccaacggcactgggcgcgtcaacaaccatcagttttacctcgcgcaccgtgattttgcggcgcactccagcgacctgctgcatcagttaatgggggcgctggtgcaaaccgggcgctatatcgacgccaaccgccttgaggccgctaacctgctttccgctgaactgggtctggcgaccgactcattgacccacgccctcgcccgccgcagccaccagacgcagagaatggatcttgcaatcattcgcgaccagcaggccatcgccgaccgattttatgcgctggggctgttgcctcgtgctatcaaggtgcgcgatgccgtctggtccgactcaccgccctgacagcacaaaaatgaatctaacttatgacgttattctattaagcgcttattccgtattttgttatgttttgccaacaacctaacttttagaaatataatctgcaggaaaataacgatgaaaaaattcattctcggcgcgctgactgccgccgttttgctcggttcgttccaggcggctcaggccgaaaccgcgcccaaggtagtcaacatcggctatcaaaaggccaatatcttcgccctgctgaagtatcgcggcacgctggacaacgatttcaagaaacaggggatcgacgtgcactgggtcgaattcaccgccggtccgcagatgcttgaaggcctgaacgtgggcagtatcgatctggccgccaccggagatgcaccgccggttatcgcacaggcagcccatgctgatctggtctatctcgcccactccgtgccgaatccgcaaaccgaagctatcgtggtacccgaaaattcgccgatcaaaaccgtcgccgacctgaagggcaaacgcgttgcgcttaacaaaggctcagacgttaactacttactggtcgcggcgctggaaaaggccgggctgagctacaaggacatcaagccggtgtatctggtgccgggcgacgctcgcgccgccttccagagtggcgatatcgacgcctgggttatctgggacccgttcctggctgaggtagaaaccaacgccaaggcacgagaagtgcagaacgccgaaggtcttgtgccgcactacaccttcttcctcgccagtcgtaaatttgccgacacctatccgcaaaccgctgaaaaactggttaccgagcttaaggccaccagtgactgggcaaatcagcatcacgatgagacggcggagatcctgtcgaaatcaaccggtctggcgaaaaacatctgggcaaaagcgttagcaagaatgccttatgacgcgcagcgtatgactccagcagtattcaagagtcaacaggtgttagcggataaattcacccaggttggcctgctgccgaccccgttaatgtcagtagcgcgacctggtcattggacaaacactgatagcaaaaagtctgccccttgcggggcagactctatttaatcttctctaaatttgtgcctttctcaggccagcgcctgactttttagcaatgcctcaatcttgatttgttcgacgctcagctgcggattaaacagaccggtagagaggtaggtcaacccgctgtcggcaagaagggtcacaatgcgtttacccgcattctccgggcgacgcgcaatctcgcgtgccgcatgcagcacggcacccgaagattcgccaatcagaataccgtcggtttttgccacttctcgcgcggcctgaacggcctgccagctttcaaccgccacgacttcatcaaacagctcacggtccagcgtcagcggcacgcgctcgggtgtcacggtgctgaaggcatgaacgccggtaatttccctgacctcagggttatctttgtcgggaattgaatgtctccccggttcaacggcgataagcttaatgtccggcttgagctggcgcagataacgccctgtccctgacagcgttccgccggtgcccaccgaggcgacaacgatgtcggcctgccccgaggtctgctgccagatttccggccccgtgctctcatagtgtgcctgcgggttagccgggttctccagttgataggtgaagaagatattgggttccttgaggataacattgtcagccagccatttggcggcggccacgaagtccccgtcgctctcctcaaggattttatcgaaaccgggcacctggctaaacggaataatttcggcaccgaaagcgctgagaatagcgaatcgctcctcactcagtttgtcgtgtaaataaacgcggaatttatatcccttagacgccgcgatggccgcaagaccaataccggtatttccactggtggtatccaccagcgtgacacccggctttaatttaccggaacgttcggcggcctcaatcattgccagcgcaatgcggtctttaatactgtggttgggattgaaatattccagcttggcaagcaggtcaacgtttaatttattttcctggctaaaccgcttgagccttaataacggcgtctgtccaaccagttcagtaattccattatgaattgtcatggtgtgctccacacataatcaggcaacgggaacgtcggcgccgagcaactgcagcgcctgagtacgtaattcaaccaggcgcgggtcatcacgacgtcgcgggtagggtaagggaacatcgatagtttcaatgattcgggccggacgtgggctaaagaccaccacccgattcgccatcagcagcgcctcttcaacgtcgtgcgtcaccatcagcgtggtaaaacgctgttcgcgccacaggttcaccaactcctgctgcatgcgaatgcgggtgagcgagtccagtttaccgagcggttcgtcgaggatgagcagacgcggatgattaaccagtgcgcgggcaagtgcggtgcgctgcgccatgccgccagagagctgatgtggccaggcgttggcgaactggctaagcccgaccttttccagcgtcttgtcaacgtggctgcggccgtcgtcggtcagtttaccgcgcgtttgcagccccagagagacgttgccccacacgctgcgccacgggtaaagcgtcggatcctgaaacaccactacgcggctgggatcgggctgcaacagcgggcgtccgtcctcaaaaatatcacccgcgatcgggttatccagcccggctacgaggcgcaacagcgtggatttcccacagcctgatggaccgagcagcgcgacaaactcaccgggttcaactttcagggaaacatcttcaagcaccggaagcgtttttccttccagataaaatgcgtggctcacctgattaatatccagcgccaaccctgtggtgcttttaattgtgtcgcctgaagacatggcctaccccattgatggttgttctgaaataaaatattccggttttgaggtaaaggtaaatgcttaataacagcaaagctaacctgaaaagtgaataagcgagagatgaaaatattaatgcactattgttattttatccgtctatctaaacctgcaacattaaacgttaattcaaaatagtttcttacaatgaatgttcctttacccctgaagtattttatttataaacaatggcggaattaaatatggcaggatataccgactcttcacggcgtgcttttattcaacgggcgggattacttggtgcagggcttggcctctcctcggtctttcccgcctgggccgacaccgcgcccgtcgacgcgggcaagctgacgacggtcaaactggcgtggggccagacggcggtatgtcaggcccccatttccgtcgctttaaaacagggattcttcaaaaaatatggcttgaacgtggaaccggttaacttcagcggccccactgattcgctgttacaggcgattgccaccggacaggccgacggcggtataggcatggcactgcgctggctcaaaccgcttgaacagggcttcgacgttgacctgaccgtgggcacccacggcggctgtatgcgcctgctggcccccaaaaattccggtatcaacagcgtgaaagatctggtgggcaaaaacgtggcggtgagcgatcaggccagcccgctgcgtaacttctttgctatccagctggcgaaacaaggatcgatcccgacaaacaggtgaactgggtgcagtatccggccgacctgtttggtgaggccctgaagaaggggaagtgcaggcgattgccagcgacgatccgcagggatggctcatcaagcatcgctacaacctgcaagaggtggacaacaacatgagcggcgaataccacaccatgacctgctgcgtgctgggtctgcgaggctcgctggtgcgcgataatccggcggtggcgcgtgccatcactcaggcgattgtcgacgcgcagcagtggacggcggataacccggccgaaaccgccaaaatcttcgccccttatgtgccgggcaatgtaccgattgacgacatcaccgcgatgctcaaggaacatacccacaatcatcactcaaccggtgagcaactgcgcagtgaagtggcgacctacgttaacgagctgaagcttatcaacgttatacgccctgagaccaacgcccagcagtttgccgatcactacgtgccgaacctgcttccggcctcgcacgatgccatgaacatgaagatgggctaataaggagttgccatgtccagtgatacgctcgacagactaaaaagcccggctctgaaaggccagaagctggcgctgacgcccgcattgggtatcgccctcctcgcctggtggggcctggtggcgctcatggttttctggccggacaaaccggtcggctttgcaacgccgcgctttgtaggcgagactcatcgcctgttcgccctcttctcggccctgctcaccgtcgcagtattactgggccttgtggtgcagtggcgctggctgttttcgccgttacagcgggcggcacgctggttagtggcgttagcggtgttgattgccatttgggaaacggtgaccgccaaacttgcactgctgcctgccccgttctttgcgccgcctcgtgcattggtcgaagcctatgcaaccgactggtatcggcttggcgacagcgtgttgaactcgctgagacttctggcgctaggctttatttttggcagcatcagcggatttgtcaccggcgtggcgatcggctggtcgcgcggattggggtattgggtgcatccgatcctgcgttttttgggtccggtgccttccaccgccctactgccgctgtcgctgtacttcttcccttcaagcttctcggcggcaatatttcttatcgcgctggcaacctggttcccggtcaccgtattgacctggtccggtgtctcaagcgtggatagtcgctattacgatgttgccagaacgctgggggccagcaatgtgttcctgattctgcgcgtcgcggttccggcgtcactgccgcacgtgtttgtcgggctgtttatggggctggggcatctttctcggtgctggtcgcggcggagatgatggggtcaagtctggccttggctggtatctacagtgggcgcagggctgggcggcctacgccaatatgtatggtgcgctgatcgtcatggccttattgttctcgtcgctgattacgctgctgtttgccgtacgtgacagggtgctggcctggcagcaaagcgcggtgaagtggtagcagacttattaacggatattatttatcccttacgattagcaaattaaaaaatctctgctaggttttaaacagttattactccctgtgttctaagcgactttgcccgcctcgtgcgggtattttttcgtctgtactataatgggttaggaaaacacttggctttattcttttcattattttattacacacaaggggaagtatgaattatctcgcatggactgcagcaacgggcggtttactcctgctaatgtcgctctcttacggctggataaatcgcacaccggtccctattttcggtatttatttgctggtcggcgtcgcctgcggcccgtggggcttcaacgtgcttaatattgacgttctggcccactcgacgatcgtcagccgtattacagaaatcgccatcgcgacctcgctgtttattactggcctgaagatacgcttaccgctgcgggccagcatctggcgtataggcgttcggctcgccattccaggaatgatcctcactgtgctgggcgtcatggtgattgcccactatctgaccggattatcctggccgatttcactggcgctcgcggccattatcgccccgaccgacccggtgttagccagtcttatcgccatcaacgatgcgcgtgatgacgacagtctgcggctttctctgtcgagcgaggcagggcttaatgacggtacggcgcttcctttactgatgctggcgctgctgtggcacaacgccgagggggcactctcgacgcaggcgcttgtccactggttcacgattgacgtcgtgtggtcgctggttgccggactggggattggctacggtcttggccggcttatcgggcttatttctacccattggcggcatgcacagggtgaggttgcgcccagcgattttattgccttatcgttgatctgcctaagctttgcgctagctatctcggtcgatgcttcgggctttttggccgcctttgccgccggtgtgggcctgcgtagcgccgagcttaaagtgcagaaaaagaatccggctgaagaggagcaggaggaaaatcccccgccgagatgatgatcaacccgcatctgcgccacgctatcgagcaacgaagcccgctaaaatccatgggcctgctgattggtgatgcgctgtctttcggcgatacgattgagcgactcttcgccgccgcgattgtgattgtattaggcgtcacgctggcccagcattgggaattcatgggccttattctggcatttattttattctttattatccgaccgctagcggtgtatttatcgacctggcgttcgtcttattcccgtcagcagcgcatattatttggctggctgggaatacgtggcatcgggagtctcaactatattgcctatgcttatacgcacggcatgcagggcagcgaggcgacaataatgaccaactgcgcgctgacgattattaccgccagcgtattggtgcatggaattacggtcacgccgctgcttaatttctggagccgaaaataagcagcgagcggccccccgaattccggggcttacgcagaggtttacaccaactctcgcagcgcctcggcggtgaagtctttgagtgcggcctgattaccggtgcggattttcgtaacccaatgtggatcgctcaacagtgcgcgaccgacggcaatcaggtcgaactcgttgcgctccagacgttcgatcaacttatcaaggctggcagggtgcgagctttcaccggcaaaggcggacataaagtcgcccgacaggccaacggatccgacgctgatggtggcggcaccggtcaacttcttggcccagccggcaaaattcaacccgctctcgccgtcaattccagggaattctggctcccagaagcggcgctgcgaacagtgcagaatatccacaccggcctcaaccaatggcagcaaccagtcggtcatctcctgtggcgtcggagcaagacgtgcggaatagtcctgctgtttccactggctgacgcgcaaaatgagcgggaactcaggcccgacggcttcacgcattgccttcaccacctcagccgcaaagcgcgaacgctgcttgagcgtggcgcccccgtaggcatcggtacgctggttggttccggcccagaagaattggtcaatcaggtaaccgtgcgcgccgtgaatttccgcgacgtcaaaacctaaacgtttggcgtcggccgcggcctgagcgaaagcggcgatagtgtcggcaatggtctcatcgctcatggcctcaccgcgcggttcgccgggagctatcaggcctgatgggctttcgaccggggattcaggcacccagtcggtcaggaagctgaccaccgagccggtatgccacagctgtggccccatcttgccgcccgcggcgtgcacttcatcgatgacctttttccagcctttaagcgcctcgtcgccgtggaagaacggaatgttggcatcgtttcgcgacgcggggcgattgataaccgtcccttcggagaggataagtccgacttcgccctcggcgcggcgctgataataggcggcaatattttcacccggcacgccgtttggcgcgaaggaacgggtcatcggagccataacgattcggtttttcagtgacaggcctttcagatgaaagggttgaaacagggcgtctacgtttgatctgctcacagggtatttctccgtttaggttatcggcattcatagtataatgtgtatactaggtgtcaattaggcactttacagctaccaggtatctccatggaaaccacgatgtccgaaatacaacctgttaccgggattaactgccctcaccgtctcttgctcgaccagattgccgataaatggtcggtgctgatactcgcacagctgtgtgaaaaacctctgcgtttcaatatgctcaaacgtgagctggaaggcatcacccaaaaggcgctgacccagagcctgcgccgcctacagcgtaacggcattatcgaacggcgagttattacctcctcgcctatcgccgttgaatatgaaatcacgccgctcgggcgcacgctgaaagagccgttcaaggcgttgtatgactggacgcgtaactatctgccgcaggttgaacaggcgcggctggcgtttgatgccagcaatccagactaaggttattccttttcgagccactgaatgaaaaattcactaaaggtcgagacctgcaacggctgaaaacggcgctgcggatagacaaactgtagcccaacctgctttttatcatgacggctaaagcccagaaagcagtcggccaacaaaaccttgagccgcccctgttcgacgtctcgcttgacgtcccaccaggatttactggctatccctgcgcccgccagcacccattggcgcagcagtgccccgtcatcgcagaccatgacgggcgtaacgcgcacggtttcaggtgcgccctcttcgtcaaaacgccattcattgagcaacgtaccgcgactctgcagcgcaaggcagcggtgatgatgcagcgcctgcggcgcatccggtaccccgtgtttctccagataggccggtgaggcgactatcactcggcgattagctttaataaaacgggtcaccagattgctgtccgggagattgccaaagcggatgctcatatccagacgatgggctataagatctacgacatcttcgctcaaaaacaccgaaatcttcacttcaggccataactttgcgaagtccagcagcgccggtgacagatactgacgaccgaaatcggaaggggcagaaatacgcagtgtcccacttgcgccctctttttgcgtcagtttagcttcggcctgcaccatctcctccagcacgcgtagcgccgaatgataaaactcttctcctgctcgtgtcagcgcaattgagcgcgtcgagcgattaaatagccgggtctgatagcgctcctccagcgcctttagacgcgccgtcatggtcgccggagacaaattcatccgtctgcctgccgcagccagaccgcccgcctccaccacttcgaccagtaaggccatatcttcaagcttgcccatattattcggatttcctgaatagataatcagtttttgtcgtcattatcaaatacgggttgcagaggtaaagtcaatacatcccccttatgcaggcgcaaaagggtgcctgaacactcactctattttattgtgtcaataaggaatcaatcatgagcaaacaacgtactttgattatcggcggcgcatcgggcattggtttcgcggtagcgcaacagctggccgcacggggagatagtttgatccttgccggtcgcaacggcgaaaagctacagcgtgcggctgaaacgttgcgaacttctgatgcgcagattgagacgatagccttggatatcgccaatgagggagcattgcgcgagctgtcgaaaacgttgggccaggttgaccatatcgtcgtaacagcgggttcactggcgccgggcggcacactcagcgcgctcgacctttcagcggcaaaacaggcctttgacaccaagttctggggcagccttgccgtggtacagcatcttgcgagtcaggtcaaaacaggcggcaccctgacgttgaccagcggctttttggcgcgtcgcagcgtcgcgggcacgatggtgaaaacgaccatcaatgccgctctggaggcagcggtcaagattatggccaaagagctatcaccgctgcgcgttaatgccgtgagtccggggcttaccgataccgaagcctatgcggctatggccccgaagcacgccagcaaatgctggagaaagcggcggcttctttgccggccaaaacctggggacgcgcagaggatatcgccaaaggatatctctttatcattgataatccgtttgtcaccggttcagtggtggatatcgaaggaggcgcgctaatcgattaatttaatttcggcatccctcagccccgcggctgcctctgcgggcactcctcatctaaagtcaaataaccctatttcgattaagtttttataattactgaatgttttcattacttaggcgattaaaccttaacgttattggggaagttttgcccaagtatagcctgggctatgtatcttaccacttgctataagtacatgaaaaatatggtttttttatttaagtttttatggcagactagcggcctcttttaattaatagcctttattcctcttgaaaggcttaactggtctgttttatgaacacatacgcaattcttattctcgcctttggcatgtcgatggacgccttcgccgcggctattggcaaaggtgcctcactgcatcgtccaccgtttaaagaagcattgcgtaccggcttaatttttggcgtgatcgaggccattacaccgattatcggctggtgtatcgggctggcagccagcaaattcattatgagctgggaccactgggtggccttcggcctgctgctgattcttggcctgcgaatgatccatgaaggtttcaaaaaagagagtattgatgaggcagagatcccgcgccgccatggcttctggctgttggtgaccaccgcgatagccaccagcctcgatgcgatggccgttggcgtcggtctcgccttcctgcaggttaatattatcgttatggcactcaccatcggtgctgccacaacaataatggcaaccagcggcatgctgctcggacgcttcctcggcggcgctatcggcaaatgggccgaagtgctaggcggcgtcgtgcttatcggcatcggttcgtccattcttgtggaccatctcggcctgctgcgttgatttaactgacgttttccactccggcgctaacgaaatcaaccccagcagcgccgttatcatgccgtttgagaaaccggatattgagccagggatcggggtaaaataggtaaatgcggcccgccgagcatcatggcgcaggcataccaggacacccaatatcccaccagggcaaccgagacacgcaggcccatagctatcgcatttattatcgcgctcccctgaaattcactgctgaccatcgcaaaaatgccaaagctcaatgcgtaaatcgccacgggtaaacacaccgtagaatcttccttaacgtgcaatgaattcatcggggtgtctctccttgagaccggtttttttatttatgtactagaaattacatcattaacataagcgatagtttttatcagcgccaagcaattgtgttattgtgactacataattaatttcgatcgacaaacagggtaaaacatggccaaacgacgaggacgtccgctgggatttgaccgcagcctggcgttgcaaaaggcaatggagattttctggcgcaaaggctacgagggcacgcagcttgtggatctcacctcagcattaggcattaatccgccgagtttttacgccgcttttggcagcaaactgtcgctgttctacgaggccgtagacctctacatcgcgaccattggcagcaaaaccatcgaggcgttgaatcaggaggatgtcacgcgcaaggggctgcgcgccatgctggaaggcgctatcgccaatgcaacgtcctccgagtcaggcgggtgtctgatggtcatgggcgtggtcaataatcacgctgagaatcgcgaagcctgggcctttctgcgcaataagcgggtcgaaacacgcgaattgatccgcgcgcgcattcagcgaggaatagcacaaggcgacctgccggctaacgccgatgaccaggcgctggcggcacattttctgggcgtaacgcaggcgatttcatttcaggcccgcgacggtgcgtctcagccagaattgtttgccatggtcgagtcggccttggccgcgttgccgtcggcataaagaggccataagcttcaccaacgggaatgcattaatgaaatagcggatttggaatttatcgttctccatagcgatactttgaaatggcaccaaccctacgcagccggtgcctgctcaatggaaaataatcatcattatggagaaaaagatgaacaacaacggctatagccgccggtcagtggtgcttggcatgaccgctctcgggatgatgtcggcgataaacggcgcggtttgggccaagcctatcccggaaaatgacgcgaaaagacgtttcaccgtccctccggtgcctgcgactgtcaccaccacatttatgactcccgctttcccacgctgcccggcgcaaaactcacgcccctcccgccacggtcaccgattatcgcgcccttcaacggcgtttaggcaccacccgcaatgttatcgtcacccttcggcctatggaattgacaaccgctgtctgctggatgcgctggcgcagatgggcgcggcggcgcgaggaattgcggtcattaactccagggtgacggacgacgaactagagaaactcaaccatgcaggcgttcgggggatccgcgtgcttttcggtcgaaccaatcccgttcaaccttcagagatagagacgctggcacagctcatcaagggactcggctggcaaatgcagttttatatgcccggcgcgcagcttgtcgacctctcaacgacgctgcgtaaactccccacgccagtggttctcgaccatatgggacacatcccgcagccgcagggcgaaaattcagcggcctataaggccgtgcgtcgtctgcttgatagcggcaacggttgggtaaaactgtcgggagcctacatggatactcgccttggcccacccgactatcccgacacttcggccattgcacgcagctacatcaccgccgcgcccgagcgcgtagtctggggatccaactggcctcatcccgcggcacaggccggtgaaacgcctatgccggatgatatgaacctcttcaatctgctcgccgaatgggctccctcgagcaccgtgcgggaacagattctggtcaggaaccctgaggtgctgtttggttttgatgcgaaagatcgtcagccgcccgccaaagcggtgtaaaaatttcgccctgtagttaactggcagcgtgcctttgcagcacgctgcgcatgataaaatcgttggtgcgtttcaaattttccagttcgggttcaaccttaccgtacacccgcatcccttcaagcagcataaacaccgtttccgccatcacctcggcggggtatctgacctgaagacctgttgctgctgcccacggcggaaaatcgtctcgagattctgcctgataccgctgaacataaattcgactctctcttgtacttctcgatccccaggcagtaactccgtggcggtcgcaatggttaaacagcccgctttccagcttccccggtcgacaacattgcgccatattccagcgtttcacgcagtgcggcttcggggtccagttccctgctgcgttgctgtaaacgcgctaatcctgtttccatatattgcgtcaaggcggcgaagaaaacgcttcgcttgtcgggatacagcttatagatgctggcgctggcgaggcccgaggcctgcatcaggctgctgatagacgtgccctggtaaccgttgctccagaaacactccatcgccactttaagaaagtcttcaggctcgaacgctctgggtctgccgagattttttttcattgttacgcatcttgttgggagtagagttgataaaaacattgtagattgatcactctacaaagcaatttttttgcgttactctggctcaaaaccgcctttcgaaccggggatcccatgctttctcaacagggcacgaaaacagtccataagtcgcgtataccactcttcgcaagtgcatttatcatctcgctgggctacgtggtggttcagctggatgtgacgatagtgaatgtcgctctgcccacgctgtctcacgtttttaatgccgatgtttcggtactgcaatggatccccgacgcctatgtcatcgtttttgccgccctgctgcttgccgccggtggccttggcgataaatacggtaatcgcacggttaatctggcgggcatcgctctgtttttacttgcctcggtgctctgcgcctgctcatccagcgtcgagagcatgatttttgcccgtatcgctcagggagtcggcgctgcgcttattgttccttcgtcactcgccctgctgtcggcggtctgtggggataatccggtccagagaacccgggcgattgggtggtggagtgctatcggaggcatcatcagtgcggcaggaccttttatcggcggactggtgcttgagcacctttcctggcaggttatttttctgattaatgttccgatttgtcttgccggaggggttctgaccgtgctgtttattgaaactccgacggcgcatcgcggtcagaatatcgataccaaaggcattttgctgtttgttattgccagttttacgatgatttacagcatgatcgccttcggaaaaaatttcgccctgacccactcagaactgattttcttcgcgctgtcgctgcttgcgctgtttaccctgacgcggcatatccagacaaacgaccgggcttttttgccaaagagcttgatcaaaaattcgattttttcattaagccttttattagccgcgatgatgaactttgcgttctatggttctatttttctgctgacgctctattttcaagactatcgcgggttttcaccgctgatgaccggccttgcgctgctgaccttcacgattattgcgttagcaaatgccctcagcagctctctctcggcccgcctgggggtgcgccgtaccctcattcttggtcttttaatcgcgacggctaattaccttatcctcgcagtactcacgcacgttaatgctgattacatcaccttcgtctgcttcctttttctgatgcccatcggcggaggcattgccacgccgacgcttatcgccacctttttgcaccacgcgccaccgggcaaaacggcgacggcgtcggcggccatcaatgccatgcgccagaccggtgccgcgatgggcatcgcgctgttggggctgttggtaaccggctctcatttcccgataggggtcggggcaacggctggctttgcccttgccgcgctggtgatgctgtctgcggcggtgattgccggaaggcttgcttaacgtcgcaacgcatgatgttataaatggtaattatttatctctcaccggcaggatgaaatcggcgtgtcgctacagtcatcagaatggttcagcagaaagggcatagaatgttcacgcgtggtggcgtgtgaggatttctttccgcgacatctgcacgacgaatatgtcatcagcgccaatctctccggcacggaagcgatatggatggacggcaaaaccgccgaggtctgcggcggacacatcaccgtttacaacccggcgaccgttcagtcatcccgtttcgggcagcaggcggtagagttcgtcagcgtccatctcccgcagtcaacgctccagtctttagtcaaccagcaaaatttgcgcagcagcgctgaggctccggccttacgcgagggcgtattgcaaaatccggcgctgtttaacgcaatttgccgctatgccagtacggccagagatgaagatgccgatgcccaggaacaggagtttttgctgctctgcggcgcgctattggaagatgaggtcacagcggacaggcacggcgagcaggccgtagcacgggccaaagattatctgcgcgaaaacctgattgaaaagcctcagcttgaccaactggcgcagatttgcggattgagtaaatatcatctggtgcgacgttttagccagctgatgggcctaccgccgctacagtatcatatgcagctgcgtctgcaccgtgcccgcgatctgttgcgcagcggtattcaccccttgatacgccatcgcgttaggcttttacgaccaaagccactttattaatgcttttcgcaaagtgatgggaattacgccgcatcactatgcccggcaggtgtgttcagcgcgcaataaattctctgtagcctgaagcgataacataaatcgcgaaatagctgaaaattagcgccgacgcaatataggaatatttcagcagtcggtgccccaataatttaccgccaagactccccgcaaggcataaaacgcaggtccagacgagcccggcgataaagaatccgcccaaaaatcgagaggaagccgccacgctgtgctgcccatctgtgatatcagcgcgccaccgaccgtcgcaaaccatagaatggcggtgggtgaagacattgccagcatgataccgcgcgcaaattcacgcaacagcggccgctgcgggttctcctttgcggccggtaattcattcgccgccttcaccgccgcgataagcattttcactgcaaaccacaccagcattgcgccgccgcctatccacagtgcccaacgcacggcggtaaactgcaacagcatcgccattccagccagcgcaagcagcgcataaatcaggtcaccgatgcaggttccgacacccagccaaaagccgtgaaaatatccccgctgcatcgccagcgtgatcatcgcgatgttggcgatcccgatatccaggcatagtgaaaggctaagcaaaaagccgttggaaaactgcatcatagacatcatccctgattgtttaaggcatgattaaacccggtgactcacggcaagtattggaaagtattgctgttgcataatctggccattagatgagcccatgaacatgtattactcttagggtgctgacggaagaactgaccacactgcggcccctccaactgacaggattgacaggattgacaggattgacaggagcaacatcatgccgataagccttgaagacatcgatatctctgcctggacggcgctggaaaccgccgccagcgatccccagtcaggtttcaggtatttgaacctttgcaccgtagataccgcaggcaacccgcaggcccggatggtggttttacggcgcgtggacaggctggcgcgcattcttgagtttcataccgatacgcgcagccctaaatggcaggaaatcgcggctcatcctcgcgtgacggtcgtgggatacggccaccagcagaagctacagctgcgccttgagggcaccattaagcagtatacttttgaaagccaacaggccagtgccgcgtggcggggctttctgccagaaccagaagtacctacgcgggagggcctcctggtgacagtctcgcctttcatgctgcggctgatgacgccagcacgcagccgttggatgacgcggaaggactggctcatttcggcgtgttaatactgcacgttaatacgttggactggttccagttgagcagagaaaataaccagcgagcctggctgacctacaccgacagcggcgctctccacgccagcaaatggattaacccatgacggcttcagtcacgggtaatcgatattttaaagccaggcattttcccgattcatgcccgctccccgttagaatctcaccatgacatggtctcgatgcttgtcttgcccgacataaaaatacgccgcgccaaccggcgtaaagccatgagtagtatagaattttatagcgcgaccgttttcttcattcaccagcaatcttacgtggccctctatgctatgcagcgtttcgctaacgagtttttgggcatagcccgccccgtggaactcggccagaacatagcaacgcgtcagctccgctatgccatccgcttcaggaatccctaccgactccggctcaaggctaagcatgctatagccgataattctgccatcgacttcaataacatgaagctttctgctgggtgaggtgaggagattttcaaagcattcgatctgcaaattcgtttcgatgtagtttcgaacatcctccgcaggtgtacttttaggacaggccaggtgaaaagtcgccacggctaaatgactgatagcggcggcatctttcaaggttgccagacgaacaattgcactcatgaaggggctccctgttaggttttttattgctcaatcaagagcggattatcggtcgcgtttcttttttaacattattattcatccataacatgccgcttaatataaatcacaggtagttcattgaaaaataaaaggttaagttgacaatatttcattaaaaatatgatttttaaggataattattaagtttctttatggttcagcaccttagtactttctgttgtttttctctttcaaaatcgtgccccacatgattatactgtatatataaccagtaatcatatgggtatcctaatgacttttatccgtgcagcacgttcacccgtcgacatgccactcccttatttccaggacaaggtccggccggtttcccgtctcccgcgcaggactatattgaaaaaagcatagatttaaacaagctatgtattagacatccggccgcaacctacttcgtttcggcgaccggtatctcgatggtcgacgccgggatcttcgaaggatcgatgctagtggtcgacagaagcctcgatgcgaagcacggtgacatcgttatcgcctccgtcgccggtgaatacaccgttaaacgcctttgcacccatccgttggtcaaacttgagcccatgaacccgaactttcccccgatcgttctgcacgagggcatagacgaactggaaatttttggcgtggtgacgttcagcatcactgggtttaaataatgtttgccctcgccgacgttaactctttttacgcgagctgcgaggcgacattccggccggacctgaaggggcgtccgattgtcgtgttatccaacaacgacggctgcgttatcgcgcgcaataaagaagccaaagtggccggcattcagatgggcgctccctttttcaaagtgcggcaggcctgcgaacagcataaggtggcgatttttagcagcaactatgcgctgtacggcgatatgtcatatcgggtgatgactctcctcgaggagatatgccccaaagtcgaaatctactctatcgatgaggcgtttatcgacctgcaaggggtcagcaattgcaaaaatctcgaaacgtttggccacgaaatcagggacaagatcgataaatgcaccggcctgaagatgggcgtgggcatcggccccaccaagacgctggccaaactggcaaaccacgcggctaaaaaatggagcaagacggagggcgtggtcgacctctccctcctcgctcgccagcgcaaactgatggcacttatcgaggtgggcgaagtctggggcgtcggcaggcggatatcgaaaaggcttaacgcgatgggcatcaataccgctttacagctcgccgacgcctctccggcgcttatccgcaaacatttcagcgtagtccttgaacgtaccgtgcgtgaactgcgcggcgagccttgtcttgaacccgaagagttggcgccgaccaagcagcaaatcatctgttcgcgatcttttggcgatcgcgtgagtcaatatagcttgatgcgtgaggcgatttgcagccacgccgtgcgggcagcagaaaagttgcgcaaagagaatcggtactgccgtcatatctcggcgtttgccaaaaccagccccttcgccgacggcgaggactactacggcaattgctgctccatccagctgcaaatcccgacccaggatacgcgcgacattatcgcggcggcgaccaagtgcctggatgacctctggaaagaggggcatcgtttccaaaaatgcggcgtcatgctgggtgacttttacagccagggcgtggctcagctcggattattcgatgaaatcaaacctcgcgccaacagcgaacagctgatggcggcgattgatttgattcacaaagacggtaaaggccgggtctggttcgccggtcaaggcgtcgaaagaagctgggagatgaagcgtgagatgctgtcgcccgcttatacaaccagagtgaatgagataatgaaggtacggatgatttgaaaagtcggcctgcatgagaatcgcgctctggggacagagcgcgaaacagagttattgctactgcgttgaacagtgttttaccccattcgctgcggatgaaggtcgcgaggtgagcaatctgcttgtcgtttaaacgccatccaaagtcaggcatcgcaagctgtgtcagcggtggaaagacattcggcgctccctggctcgtcacgaaacgtgaacattgcggccgaatagcctcattagaaatagcgttaatgccgtgagtaataacaggaagagaaaattgccgagacaggcatcggcgggagggaacgtcagcgcagcatacaaaaaagccctgctcacagagatagcagggctcggtaatttttgattaatcaatgattaacgattgatcatctggtcacgttctggaccgacagaaaccatgctgacgcgaacgcccatcagttcttcgatacgctcaacgtaacgctgtgcagccaccggcaggctttcgaaggtacggcagcctgtgatgtcttcgctccaggattccatctgctcgtaaacaggtgccagtgcagcagtctgtggccagattgggttttcagtgtgctcacccgcgtaggcgacacagattttcaggtcagccaggccggacaggcagtcgatcttggtcagggcgatttcagtcgcagcctgtagctcaacgccgttacgggtggcgacagcatcaaagtaacccatgtcacgtggacgaccggtggttgcgccaaactcgttagcgttctcacggaagttatcctgctcttccatggcagtaaccagcgtgccggtaccgacagaagaactgaatgctttagccaccgcaatcacacgctcagggcgcagagccggtaagccactgccgatacctgcataagcggcggtcacgtttgaagaggttgtccacgggtattcgccgtaaaccaggtcacgacctgcacccagctgggcttcgaacagcaggttagcgtcttgtttctgtagggctttcagtggctcggtcacgttgcagatgaattcacgccatggtgcggtcacgtctagcagccatgcggtcatttctgcagcggtctgggtgaagtcaaagcttgggtacagcgctttcagctgtggcagtttccagtccagcatgaactgaatacgttcctgcagaacttcaggctggttcaaccaaccgatcaggatgccttttttcattacgcggtcgccgtaggctggcgcgatgccctgacgagttgagccgtaagctgcatcgccaagacgttgttcttcaagagtatcttcaagtgcgtgcagcggcaggcacagagtagcgcggtcagagatacacagtttaacgtcaacgcccgccgctttaacttcggcgatttcctgagtcagcgccgctgggctgataaccatgcccgggccgagaacggcaacgcagcctttgttgaaaatgccgctaggtaactggtgcagcttaaaggtaccgaagtcgttaacaacggtatgacccgcgttgttaccgccctgaaaacggatacttgctgcggcatcggctgccagtaaatctacgatgcggcctttgccttcatcgccccagtttgcacctaccactacaatcgacggcatattcaactctcctcattgattaaggagtcatgctatgcccatgattcaaatatgagaaattaattataattatcatctcaataagaatctcatataatggctgcagaaaatttttggaaactgctcctgaaaggccaataacatgctggatattaactggttaaaaacgttcgtcacgctggcggagttacaacactttgggaaagccgccgccgcgctgcacatgacacagccgaacgtcagtctgcacgtcaagcaactggagcagaccacgcgggtcaagcttatcgagcgcaatccctttcggctgacgcaggcgggttatcgcctgctggataccagccagagaacgctgatggagcttcaggtttgtcaggcggacctcaacgcgattaacgatcaaagccgcggtacgctcaccattgccgccagcgatatcatctcgcgtctgttgcttatcaaacctttccagctgtttaagaaacagtttcccggcatcgactttacgctgttgaacactacctcctcgcaggcatcggagctggtcaaaaacgccaaggccgatctcggcttcgttattgagcaaaaagagagccaaccgctgtactttaccgaactacagcagattaaatggtgtgcgctgggcaacaatcttgagctatggcagcgcgagcagcagcctgaaagcaccctccatgcagatcaacctacgctgattttgctgggtcacgatactcgaactcgcgacctgctggatcaagcgctgccgttacttaatctgccgcgctatcgggtgatggaggtcggcagcgtggatgcacaaatcgactgggcggaggcaggattcggcgtggcactggttccggagttttcactgcacagcaaaaccaacctgaccactaaaatcacgcccctgccggagttccctgcaacccgccttggctatattttgcgacagaaccaaattctctctaaggccgtcaaacagctgctgcaatgggtgaatcaggagattgtcgattctcaacaataagtgacagggtcacgcctctcccctctctgacagcacagattgctcccctcttcgcccaaatcttacttgtaagtaagtttactagtaagtaagattttaatcagcaaaacatctgcacgattaatttccatcgcatctacacagcaataaaaatacttaattcataataatcaacatattgagggttcgagctatgtcgtccaaactgccactgctggcattggccctgggttcatttgggatcggtaccaccgaatttgcgcctatgggtctcttgccaaccattgccaccggcgttggggtttctatcccgaccgccggactgctgatcagcgcctacgctatcggcgtgatgattggcgcaccgctgatgacgctgttcatgagccgctatcgccgtaaatcggcgctggtgctgctgatgggcatttttgttattggtaacctgctgtccgctattgcccctaattacaccctgctgctgctgtcgcgcgtggtcaccagcttctcacacggtgccttctttggcctcggcgcgctggttgccaccagcctggtaccggtcgagaaacgcggtagcgcagtggcaataatgttttccggtctgactatcgccaacatcggcggtgtgccggtcgccaccatgattggacagacgattggctggcgtaccacctttgccgcgaccgccgtgcttggcgttatcgcgatgataggtatcgccaagacgctgccgaaaggtgaagcgggtaaaatgccggaagtgaagaaagagctctccgttctggtgcgccctgtggtcctccgctctctggcgacgactgttttgggtgccggtgcgatgttcaccctttatacctacattacgcccatccttgagcgactgacccatgcctccggtgagttcgttaccgcaatgctgatgctgattggcgttggtttcaccctcggtaactatatcagcggtaagctggttgaccgctcagttgatggcaccttaatcttgttcttcagcctgttagccgcctcgatgtttatcatgcctttctctgtgacaagtcacatcggtgctgcagtgtctatggtactgtgggggatgatgtcgttcggactgattggaccgctgcaaatgcgcgtgatggacgccgctcatgaagcgccgggcatggcgtcatcggtcaatatcggtgcctttaacctcggcaatgcgctcggtgctgcactgggtggcggcgtgctgagttcaggcctgacctatgcgtggatcccaccggccggtgccgttctcgcgctgctgggtctggtactggtggtggccagccgggcttcaaaccgtgaatttgccagcgaaagcgcataaatctttcagaaaaggatctgtgaaagtcgtgatgcaaaacaaaacgtcttccctgccacagagagcgcccctgcaaagggcgtctccctttccaaaggtgagagaacccacgccaaccttcgccgtcatgcggcggcggagtttgcccgattaggttatcacaacaccaaggtcagcgatatcgttaaggcaaccggcgtctcgcagcccactttttactgctattttgagagtaaagagatggcctatgaagacctgatgaccgaatttcgttcacgcctggagaccctgacgctgacgtttctgattgaaggcgaggcgcacgcggaagaggtgtttgaccgcgttgcgctgagttttcagcagcttctcgactttctggccgaggatccggacctgacccagataggcttcttccaaccgccgggctgcacggccaccaaggcgggtttggcagagcttatcggtcagaacattgccaaagagcagaaaaacgggctttaccgcaaggacattagcgccacgcaaatgggccagtgttttgtgggcatgctcgaccaaatggcgcgtattcccggtgatgcacaaaaacgtaaagaattgagtctgggatgcgctacgctgctttgcgaagacatccgctccggctgccagccagagaacaaacgctaacccctccccacgcgggctgtcggcccgcttatcccttttcgcatccctccctctttctattattaagaataattaaacatttctctgaacccgctcgcgcgtgggatgtctcaattctggctcaggttttgttgcctcctgagcgtccaaagtgaaaatttagcctatccttcatattcatccgtctagcgttggcgaaggcaggtgcagttaccttcgtcaagacgggttgccgaaacggaattatcactatgggcaacttattaattagggtaaggaaattatgactagcgatctaagcattaaagagacccgtccagtaaccgacccggctcgacgcaagcgcacggaccagattgccgatgagataaagaagaccatcattaacgataacctggtgccaggggatcgtttaccgcaggagaaagacctgacaacccgtttcgcagcagggaaaggcacggtgcgggaggcgttgaaatccctggaggttcaggggctgattcgcacccgaacgggacccggcggcggtgcgtttatcgagtcgatgagcgaaacccgcgccatgagcctgctgtcgaactatctgtttacccgtcaactctccatcagcgatatctactccctgcgtaaagcactggagccagtggtcgccgtcagtgccatagaaaatatggatgaggcgggttttgaccagcttcagcaactgattagcgtctacgaccgcgacccggcaaacgatcaggaacgctgggatcaacttatggctgaactggattttcacggcgtggtagccagctattccgacaacgtgctgttggcctttatctgccactttctccagcgcctgctgaaggacctggcggtatgcaaaaaaatctataagcggcaagaacccatcgagcgcagcgaaggcattgcccttcagacgcgtttaatcgatgcgatgcggcgcagagatgcgcagcaggttgagcaggtgatgcgcgagcatatgcatcatgcggagaagaccatggtggcgttaagagccaccctcgacactgcgtttctatagcgccctagcccggctcgctcaaacaacgactcgggcaggggagcgacttatttaaacaggtcatccaggcgatcgtcgtcgataccggcaggctcaaggtgcgcggtgacgtcggcggaggtaaagagcagtctaactgccgcctctgccgcatcaccgatatcatgcccaacgtcaacggacagcttgccgtcaacctcgacgtgaaactcgacaaacactctgtcaccgccgttacgcgtacggatatcgtgcacccccttgacgccctcgcagctcatcaccgccgctctgacacgtttgcggtcttcaacgtcgagctctctgtccagcaattgcttcagcgcatcggccgccatgcctttggcattccacagcatgtaaaacgaaatcagcagcgcaccggtggagtcggcgcgggtccaacccaggtaatgttccaatacaagcgccagcaaaacggcgatattcaccgccacgtcggtaacgtagtgcgcacgatcggcggcaatcgccgtggatcctgtgcgttttactacataggtctgcatcagcaccaaccctaccgccgccagtgaactgccgataatcacccagatgccgagccctaaggccgccagcggttgagggtttatcaagcgttcaatcgattcgacccccagcaccaacccgcgccaccgagcaacagtgcctgtacaaatgccgcgacggcttcggccttaccgtgtccgtagcgatgccccttatcagcaggacgccccgcgtaacgtacgccaatcagcgtgaccagcgaggccagcacatcaaccagcccgtctgccgccgaggtcagcaacgcaatggagccggtcgccgcccacgcccagacttttacccccaccagcactaacgcgacgatcagtgaaaccagcgaggccattcgggtcaggcctttatagggcatgtctggactcacgggagaagtcggcgtgtttgtcatacagttatcctgaaatatacattttttaataataaagagatgagtgactaatctgcagctacctaagagaattaaccctgataaacgaagtgataatcgtgacaagtttttgcggctggggaggtactttgccactttttgatcttgccataaagattttttccaacgttaccgatcaatctggcggggagtggctaaaagctaaacgaactgacttaaatttacttgcatttacaacaatatcttctagggtaaagcgagcttcttttaaatcctcgtcaaggcatactgcgtgccgactcttcgatgagcaatacaaccagcgatcataacaacatgactgataacaaaaaagaaacgacccagcacggcaacgatgcaacggacagcactaaacctggcattaactcaacgcacgtaaaatctggcgaaggccataccaacggcgatgacagcactcacggccaaaagaaagaaggcgacggaaatgatgccgaaaatcctaaaggtcccggcaaaaagccgctgatcattttaggtatcgtggtcattgttatcatcatcgcagcactcattttctggttcctgaatcgcaatctggaaaccaccgacgacgcctttaccgaaggcaacgcggtgaccgtcgcaccgaagatttcgggctacgtggtgaatctggcggtcaaggacaacgaattcgttaagaaaggccagcttgtggtgcagattgacccacgcgacgcacaggcgcagcgcgatcaggccagcgctcagctcggtctggcggtctcccaattgcatcaggcgcaggttcagtacgatttggccaaggtccagtaccctgcccagctcgcacaggcccaggctcaggaagcgcgcgcagaagcgagtctgcaaaacgccacggccgattaccgtcgtcagcgcggcgtagatccccgcgcaaccactcaacaaaatatcgacagttccaacgcccagctgcgctctgccaatgccgacctagccaacgctaaagcgcaggtgcaggttgcgtcacaggttcaactgcaaattcgcaacgccgaaaccaacgtcgaggcacgtcagcaacaggttgagcaggccaaggcccagctggaaacggccgacctgaatctctcctacgccaacgtccgcgcaccttttgatggctacgtcaccatgcgtaacgttcagctcggtacgctggtgcaggccggatcttccctgttctcgctggtctcaccggacatctggatagccgccaacttcaaagagtctcagctggaacgcatgaagccgggcaacaaagtggacattaaaatcgacgcctatccgaatatcgagttacacggtcacgtagacagcatccagcaaggtaccggctcacgcttctcggccttcccggctgaaaatgctaccggtaactatgtaaaaatcgttcaacgcgtgccggttaaaatcgttatcgacagcggctatgatcctaagaacccgctgccgctcggcctgtctgtagaaccgtcggtaaccgttgaatgagtggcgaagaaagaagttgggcccccaagagtaatgcgtgggcggtggccattgtggtcaccatcgccgtattcatggagatactcgacaccaccatcgtcaacgtggcgctcccgcacatcgcgggatcgctctcctcaagctatgacgagtcaacctgggtactgacctcgtacctggtagcaaacggtatcgtactgccggtctctgcgttcctgagccgaacgtttggccgtaaaaactacttcatgatctgtatcctgatgttcaccgtctgttctttcctgtgcgggatagccaccgagctgtggcaaatgatcctcttccgcctgctgcaagggttcttcggcggcggtttgcagccggtacaacagtcggtactgctggactacttcaagagagaagatcgcggcaaggcgttcggtctctcctccatcgcgattatcgttgcccctatccttggcccgacactcggcggtttgataacagacagttacagctggcgctgggtattcctgattaacatcccgattgggatcattgcgctgattgcgatttatcagctgctggaagatccgccgtgggagcagaaatccaaagataagttgagcatcgactatatcggtatcggcctgattaccctggggcttggctgcctacaggtcatgatggaccggggtgaggacgaggattggttccagtcgagctttatcgtgacctttgccgtgctggccgccgtgggtatcgtcggtgcggtgtactggctactgtatactaagaaaccggtggttgacctgcgctgtctgaaggaccgcaactttgcggtttccagcctgttgatgggcggtatggcgcttatcctttacgccagctcggtgcttattcctcagcttgcccagcaacagctcggttataccgcgaccctctcgggtctggtgatgacgccgggagcagtggtagtggtcttcagtattccgttggtgctcaagctgatgccgtcaattcagacgcgttacctgatagcctttggtttcgccatcatgtcggcttcttttgtgtattcgatgacgctggtccctaacattaacttcggcacgctggtgatgtatcgcagcgcgcagtcgatggggctgggcttcctgtttgtgccgctgaccactatcgcgtttattaccctgccacagagaatgaacgccgacggtgcggcgctgtttaccatgttccgtaacgtcgccgggtcgattggtatttcgcttgccacgaccagcgtgaccgaacgaacgcaggccaacagcgcacacatggtgcacaacatgaccccgctgaacgagcaatttaatattgcggtacagaaaggcgcggcagcgatccgcgatttcaccagtgtcgtgggcgacccgacgacgctggcgacggcccgcatgtatcaggagatgtcttcgcagtcgaggatcctcgcctacatcgacaccttcagctattgcgcccttgttacctgtattttgatcccattttgttttctgctttcgccagttaagagcgaaggtagtgccggagcccattaactatgtcggcctatgtatcacgttttaccctctctgttctggcgctggcactggctggctgttcggtcggccccgattatcaggcgccgcatgctaaaaccccgggcgcttttagcgacattaatcagccacgcaacaatccggcggactctatcgccctcgcctctcagccggacccacagtggtggaagtcgtttaaggacccgcagctcgacagcctgattgaccgcgccatcgcgggaaatatttcgctacagcaggcggtgctgcgtatcgccggtgcgcgtgaacaggtgactcaggcacagggcgcatggctgccttcggtgaatgcctccgcgcagatgactcgccaacagcttggccttaagggcgagctaaaatcgaccggtattcaggacaagcttgaggatatcagcccggaagccgcgagcgcggttgactcggcgaccggtccagtcaacgtttatcagggcggattcgacgccagctgggaacttgacctgtttggcggcacccgtcgctcggtcgagatggccaaggcccagactcagtcgtcggtcgaaagccgcaacgatgcgctggtctcactggaggccgaagtagcgcgtacctatctgcaactgcgtggcgcacaaacggtgctcgcgaccattcagacgcagattgacgttgcccagcagacgatggacctgacgcagagccgttctcagcacggcctcgcgccgcaggttgacgtcgagaacgcgcgtgcccagctcggttcgctgcgtgctcagctgccgcagtatcaggctcaggaacgtcaggcgatgaacggtctcgcggtattgctggggcagatcccaggctcgctggacggagaactgactcaggtcaaaccgctgccggctattccggccatggtttcggtcggtatcccgtcagagctggcgcgccgtcgtcccgacgtgcgtaaggcagaggcggatctccattctgctaccgccaatatcggggtctcggtcgcgcagatgttccccagcatttcgttgagcggacagcttggcctgcgtaacaccgactcgggatatctgaccgactggagcagccacttcttctccttcggacctcaggtctctctgcctatcttccagggcggacgactggtctccagcgtacgactgtcgcgtgcgcagcaggctaatgcggtgctcaactatcgccagacggtactgaccgcgctgcaggacgttgataacgcgttagtgagctaccgcaccgatcaggaccgcgttaacggtctggagtattcggcaagcgcgctgcaaaccagcttcgacctcgcgaccgatggctacaaaaaaggcctcgtctccttcattaacgtgctcgacgcacagcgccagctggctcaggcgctacagcaaagcgccgaggccaaggtacagaccagcaccgatctggtgtcgctgtataaatcgctcggcggtggctgggaaccttaccaggacgtcaagctaccgacctatcacgtttttggcccggccgagacggttgacaatccatgagcaatgacaacgagacgaaagcgcagtctgattcggtgataagcagcgtcgcctaccgcaatggtaagaaattgcagcaggtgactatcgaagacatcagcgaagtcatcaaggcgccagacacctttgtctggcttggactggtgcagcctgacaacagctatatgcgcgagattcagcaggagtttggcctgcatgacctggcgattgaagatgcgctgaccgcccatcagcgccctaaaatcgagcagtacggtgagtcacttttcatcgtggtcaaaacggcgcagctggttggcgacaccattcagtatggtgaaacgcacctgttcgtcggcaagaatttcctgattacggtacgccacggcgcctcttccagctatgcgcaggtgcgcaaacatgcggaggagtgcccggacttgcttgccaaaggtccgggttacgcgctgtatgccattctggacatgatagtggataactatctgaccattctgcatgagtacacgcagcagtttcagcagattgagtcgcggatgttcaagtccgagtttgatcagaacgcggtgcatcaggtttatcgcctgcgccgtgagctgctcagcctgcacaacgccgcgctgccgatgggagatatttgtaatcagctgatccagcatcatgaagggctggtgcctaagtcactgcgcgcctacctgcgtgacgtgcaggaccacgcccatcaggtggtgaccaccactgacgacatgcgtgagatgctggctaacgccatgcatgtgaatctggcgctggtgtcggttcatcagaatgaggtggtacagcagctggcaggatggggggcaattttggcgattcccacggtgattttcagcctctacgggatgaacttcaaagacatgccggagctgaacgacgcctggggttatccggtgacactcgggatcacggtggttggatgtatcgccttatacatcaagttgaaaaagtctgggtggttgtaaaaagtattttttgtgctgggcgcaaggcctagggccgctaatggggttatggggcagcgcgcaaggcgcgtgcccttgacctaaaagcgtcttaaagggacgcacaccctttattctaccgtattacccacgccccgctccggcatgtttgccagcaccatagtctgcgtacggctgagcgatacgcccgcctcgcgtagtttcttgaggatctcatacagcaggtcactcttggtgcggcttactacgcgcggactgttcacataccccgtcacgctcaacacaataccgtcaggacccagttggctgaaggaaacggaaggtgcaggcgtttccataatcgagtcgtgcgcctcgtaggcctcaagcagcatgttgcggacttcttcagggtcgatatccagcgggaaagtcagtgcgatagtcgcgacaccctgtgcgttgcccatggtggcattacgcacgttctgcgagataaactgcgagttcggcacaatcaccgttgaacggtcactcagctgcagctcggttgcacggacattgatacggcgaatatcccctcaacgccgccgatgctgaccagatcaccgactttcaccggacgctcggtcagaagaatcaggcccgagataaagtttttaacgatttcctgcaagccaaaaccgataccgaccgacagcgcgctcacaatccacgccagtcggttccactcgatgcccagcaccgacagcgtcaccaaaattagtagcaccagacccacgttggagaacagcgtcaccagcgaggcgcgcataccgcggtccatgttggtcttcggcaggaaatcgttgtccagccagcgtcgcgcagaacgcagcacgtaccagccaacaatcaggaagatcaaggcgttgaccatgtgggctggaataatgtttaggtgttccagacccttaccgccccatacgtccaccactttgctgaagatttccagcggcgtcgtggtgccgaagttaccgccgagcaacagcgtaacagcggtcagcagcagtacagttttcgccaccgcagacagaagcgtggcggccagagagagatgtcgatcgttgagactcagcgagtgtttgagcagtcgaccactggcggtgctcggtgaaaacaggctttcactcagatcgatggccagatgcatcaacgtatacagacaggcaacgaccgtaccaatccacagcagctcataggtcaggaagcgcgccagtggcacataacccaccaccagagcgacgaaaatggcaaacgccatcacgctggttgccagatgcagcagaccggccagcgtcgaacgggcttccggttgttcgcctttggccaacagtttgcggcgcaggcggttaacgcgcatcggcgcgaacgccgcgctgatagcaaccagcaaggccgatagcccgttaccgaacaaggtcaccgagatgctggtgccgaccagattgttgatgccctctatcaggccaaaaatcagaatgaaggccgagagcattttcgggaaactgtccagcgtcttggcaaccggatcggcgatgcccggcagacgccatgaagggtgcgcgatggagagcagcgagcgccccagcccgacaattagcgcagagaatatcgaaagcctgacgatcagctcaccggtttctgccacccactcgctgacgtccggcatgcgggtaaaggccagagaaaacagctttgccgcgccgcccaacgtcataatggtgatagcggccgtcgcaaaagcgaagaagctgcggcgcaggcgaccttcaggcagccagcgcggcgtcaaccaggcgagaggaatgtcgagcactcggctaccgaacaccccgatcagtatggcagcgagcagcaacagtccactgcctacgcgccactcaggctgccaggtcaggtgccacgcgtccttcatctgctgacggtattcgccaaaacgctcgacgtcatcgtcggttggcgacgtcagcgccgaccagaagttgctgccaaaaatgctgccggtattcagcgccagctgagttttcagcgcatcgcgacgcagaccgccaatttgcgcggccagattgttggcgctggttttgattgcacccgcctgctgaatctggttatcgagcgccgtcttgctggcattcaggtctttacgctgcttaatcacctgcggggtctcaggcagcgcgccagtggccggagccgggcctagcacatcgagcttggcctgcacctgagcacgcagaggctgcaaggcggtgccgagcgcatcggcatcgctgcccagtttcaaggcatcgtcgcttaatccactgagagacttgtcatttttggccgtcgatacctgttgtttaatggtatcgaggcgcttttgcagcgatcccaatgccgcaggggcatcgacgggcttggtggtctcggcggtttggtcctggtcagacgaatcgtctggagcagcactggccagcaaaggagaaaacattaacgcgagtagcagggcaacgtaaaacggcgcccggaaaagcttttgcataaagtggtttacccaaagtttcatgtatcgagaatgcgttctaattttcggaaaagggattagtactacagtaaatcttaaactgttagcggaagggatgctatgtaaggtaactcttaaaagttctaaacgaagaaaataacgcggcaaaagggattcagcacggggatttgcccgtgccgatcgtcattaaggattgatggccgctacggcatcgcgcgacgcaacctcgcgatcctcatttgtcagctcacgaagctggccctgacgcatctcgagcaggcggtcagcctgctcgaaataccggtcatcgtggctgatagccagcaccgttttgcccatcgccgagagacgcggcagcaggtcgcagtaaaaagtgcggcgaaactgcggatcttgatcggcggcccattcgtccagcaacagaaaatcacgcccttcggcggcggccagcagcagagcgacgcgcttgcgctggccctgcgaaagctgcaagttactgattttgctgtcgtcaatatcgagcttctccaccattttcagctgctgcaaccagtcttgcactagcataggatcgggctgctgcccgtctggacccaatatttttccgaacaggtggaagtcggtaaacaccgccgaaaacagctgacgataagcctcggtgctttgcgcatcaatggcaacgccgtcgagcagaatctgcccggatttcggggtatacagcccggtcaacagcatcgccagcgtcgatttaccgctgccgttacccccaataagaaacaccctctcgccacgattgatggtcagattgattggcccaatgctgaacccctgcccttcgtaggcaaagcagacgtcgcgcagttcaagccgctgccactggtggtccggcgtcgccggggcaaaatccacctgatagtcggccaaacgcagcgttttaagcttacggaaggcgacctgggcgctaagcaaggtcggcagtgcgcccacggcctgcaacagcggcgtacgcaggaacagcagcgtcagcgagaacgttgcggctacgccgttatccgaccattacagcgaattagccatgtagaagaccatgccaatcgcgcctaacatcatgatatttgaccagttcaccgcgctcaggtggtaggtgtctgcgccaataacgtgttggcgataatgggttgcgtcgcgctgatattcttcatgataaatctgctgtgcgcgttggcggttcaacgccagctccttacgcccctgaatcaccgtctcgtaatccttttgcagccgatcttcggcttcacgaacgtgattgagatgatggtacacgcgggccaccagcttgaagctgacccaaatagtgaccaccagccacagcgccgtgaccagcaacatcttcggcgacagccagccgagataagcggcgcagccgagggtgagaataatcccctgcaacagctcgggcagccgcacgaacgccagcgtgatgttgcgaatatcgctgctcagactcgccagaagctgcgcgttgccaatctgctcgatacgttcgatatcggtatccatgatgcgcttgatgaactgcccgcgcagctgatagacaaaatggtggccaagcgccgtcagggccagctgtgagccgagggtcaccgccatcaacagcagcagcagagcgagaaactgtggcaggactgacattgaggcgtgggtagtggcaatcagtttgacgttaataaaagcaatgagtccgatacccagcgcggcactcgccagactcagcaggatcacgccaataaacggccagcggtattgtttaaaaacgacgcgcaaaagctccatgaagatgttttctcgattttattttaactggacgcagtttaatgggcgagtagatgagatcaagactaattctcattttctcgcataagcggttgcgtaaaaaagctgacattgacgtgaagctcgtcctaaacttatgtaatggacaaagaaaatgaactcagaagaagtaaacgtaacgcgctgctgctgctgttaatcgccgccgcgctgtttgtcatcaccctctttttaccgcaaaacttttgggtcaacggggttaaggccatcagcgaagcggcgatggttggcgcattggctgactggtttgcggtggttgcgctgtttaaacgcgtgcccatccccttcattgccgcccacaccgcaattattccgaaaaacaagcacaagattgccgataatctggcggtctttgtgcaggacaagtttctcgaccccggttcattggtcaagctgatacgccagcatgacccggccaaagcactcggtaactggctgacctcagaggataatgcccgacagtttggcggttatctggtgagtatgatgcgcaactttctcgacatcaccgacgactggcgcattcagcaactgattaaagacgcgctttacacggcgattgataaggttgacctttcccgctcggtggcgatgctgctcgaaagcctgaccaaagacggcaggcatcaggcgctgctcgaccagacgatgcagaaactgatcgtgctgctggagcaaccctcaagccgcgagtttatcgccacgcagattgtgcgctgggtcaaacgcgaacatccgataaaatccaagatgttaccgactgaatggctgggggaaaatggcgcgaccatggtgtcgaatgccgtcaattcgctgctggatgatatcggcagcgaccgtggccacgctttccgtcaaagcttcgaccgcgttatcgaacgctttatcgccagactgcaaaacgatccaaaaatggccgccaaggccgaggagatcaaagagtacctgaagaacgatcccaaactgacgcaatacattgtcggcctgtggggtgacctgcgtcagtggatcaagcaagatctcgacaggcccgactccatgctgcatgcgagagtcaccgagtctggactgtggctgggcaacatgttgagccgcgacccggccctgcgtgaatcgatgaatcaacaaatggagatgctggcggagcaaatggcgccggactttgcccagttcctgacgcgtcatattagcgatacggttaaaagctgggacgaaaaagacatgtcacggcagattgagctcaacattggtaaggatctacagtttattcgcatcaacggtaccttggttggcgcgggaattgggctgatcctctatttgatttcacaacttcctctcgctatcccgcaggtctggcagtcgttccagtaagagagtttgctgatttcttcttaaaaatctgagtttacaatgaagccgcccacaatcgtcggggcggctttgcggcttatttcaccgttttgctaaaggcgtcgacggcaagaatggcgttggcgacatcctccgcagagaggttgggattgagattacccagcgtatcgccctctccccctgccaattctccgacttttaccagattctcgtagctctctttctcgagatgcatctctttaagcgtggttggcattttgatggcgcgatagaagcgaacgtatttagctatctcttcgtcaggacgctgctccagcaccatttgcgtcagcgtgccgtaggccactttctcaccgtgtgtcaggtgatggacatcgcccttaattgccgtaaaaccgttgtgaatagcgtgcgcaccggcaagcctgcgttttcgaacccgagtccggacagcagggtgttagcctcaacgacggcctcaaccgctggcgtcaccagcttttgctcaaccgcggtataagcgctgtagccataggtcagtagcgttttctcacaggcttcggcaatcgccatgccggcaatggttggcgcgccgccgaccatcgaggtgccgtgagaacgcagcaccgcctgagcctccacaaaggtcgctaaaccatcggcaataccggaggcaaagaggcgtaccggtgcctgcgcgcagatttgggtatcaaccaacaccagatcgggatttttatcgtagaaacggtaggtatcaaacacgccgtcatcggtatagataaccgaaagtgcgctgcacggtgcgtcggtggaggctgctgtcggcacgatggcgacgttttgtttcagttcatcggcgatagctttaacggtatcgagcgttttcccccgccgagccctaccacaacgtgcgtaccctgcttgcgtgctagcgccactaatcgattgatttcgttggtggaggcttcgccattaaagatttcataaaagaattcaacgttggctttatctaaggaggattttacccgctcaccgacaataccccagacggtttcatcggcaataagaaaggatttccccccagagcagggagatattcgccgagctggtccagaacgccgtgaccttgtacgtatttacgtggagaagagaagataaatttactcataatgacacctcggtattggaagtttttatgattgatcaatcgttcttgttaaatatctcccctctagactagttcgctttaaccgatttttcattgattaatgcagaaaaaagcaggcgaataacaaaaaaataatgatttaaatcaatagattgaatatattttttcttttataaatgataaatcagctcatatcattattattaacagactatttactaaaatataataattatccctccgggatgaccctgccaggatttaattaagccaagccgctaacgttgtttaatttcagctatcaaatctatctataaaaacggttttaccttataaggccaatcggcaaaaatagcgacatcgccccaggatagtcagttgcataaagccgcacgttgtcagctatccgttattaatattaatgagattaataaggaattttatgtataactttcaacgctatcactcaaaagaattggctcttgcctatatgagcagcaagtcacacgacttcacgccggaagagtttttggaacagcttaagaaaaccgagcaaacttttgagaacctgctgaagcacggtcacgacgtgaaaaaaggtctagtcgttagggctttttaatatcaaactagtttttgattttaaataattttctgattgaaaatcagtttttaatttcaaattagttttgatggaaaattaaattattaggtttggggtcaaaatcttccaggtcttttaagtcaaaggccccttgaagctttgaaaccggaaaagcgcctcggagcttattgacgttgaccttaaaagctggctagggcagccgcccgatcaaccccattgcccccaagccgtgcgccagcacaaaaaagggggaatttatccccccaatttttatgacatttgtcgatcgtcgacgtacttacgcttgtccggtgcaggtggaaaatactgatacagccaggtttcactgagcgcgtggtcgtgcgagcgcaggaacatccgcaactctactggatccacagactcgctggtcggataccagtcaaagagaatacggtaaccgtcaaacggctgaacgtagaggatctcgatgttgttgatcttgccggaagagacattaatcaccggctcgatccccttgtcggcgtaggccttcagctcgccgccaacgaaatcgaccgcaaaacgtcgcgcccatacggtaggataatgctcgcccggcgcccaaccttccgggaatccgcccataccggtacgcgttgccagcactttcgccatcgggctacgcacaggcggctcgctgctccagtacagacggtagctgaagtccagcgagtcaccggccttgatcggtttctcaggctgccagaagcagaccacgttatccagcgtttcgcctgtggttgggatctccatcagattgacagaccctttaccccagttgcctttcggctcgacccatagacttgggcgcttgttgtaccaaccaatcacgtcctgatagtcattgaattcgtgatccagctgcaacaggccaaagcctttcggattttcgtcagcaaacgcgttgaactgaagcttttgcggattattcagcggacggcaaacccattcaccgttgccgcgccacattgccagtcggtccgagtcgtgaatctgcggatggatggtgtcgcagcgcatacgctcgttggtaccgcagctgaacatgctggtcatcggcgagatgccgagctgtttgacgtctttacgtgcgtgcaggtgtttgtcgatttccatcaccacgcgcgttggctcgcagtggatggtgaaacgataggcgccggttacgcttgggccgtcgagtagcgcatagaccacgaaggtagtggaatcggccttcggcgtttcaaaccagaatgaaacgaaatcagggaactcctccggctggttggtgaaggtatccaccgcgacaccgcgcgcagagaggccgtactgataggtgtcatcaaccgcacggaaatagctcgccccaggaacgataccacgtcacgctgagtcaattctggcgctttgttaactttgaaaccggcaaagccaaggttggatttacccaccagctgcttagtatctacgccagcgtcatgatagttaaaaagttccgggcggaagtgaatttcacgcgccagattcttatcgccatcaagggcaaacatcttcacccgacgtttgaagcccatgccgacgtgaaacagttcgacgtccagctggcgatttggaatatcgtgccacagcgagtgtgcggcatcgtattgaatgctgttgtaggcctgtggtgtaagatttgccagcgtttctggcagcggttcaggcgcgccaccatagggctgcttcgcgagagaagcggccattttctgcaggacagagaaatcgaaagcggttgcgccaccgtctgccacgttcccctgcgccgcctcggccgaaccggtgaacagggatgccataccaggcactccacaataagcagcaaacgccattgaagctttaataaatgctcttcgttccatgccggaaaggtttcctttggcttagcaagtgtgttttccgaccgcgttcgccttcgatgtgagtgactcaaacatcccaaaggtcgacgccgccgaggttaaaaattacgaccacaaggctatcttaaaattcacataacgagtaccacaaattgaatgcattcagctaaaaaatcgcttgcaagattacggcgttcaggcgtgctacagcaaggttgtacgcgggctgagcgttaaatcatcttcatcaaatcgtccgaggaccaggctcaattttcgcccttcatttcacgacttttaagagcattctgttacgggccgtgctgatattcttacctatttcgaccaacgacagaaataaaaaagcctggccgatgaaaagccttatgggtctcaatatgaaaataagtcgtttttcccctcagcccaaataggttagcgtggatttcagacgacgtttttctccctttctctctcttaatcaggatgttgtttatgcacccgcttttgcagcacgaccttgagcacctcgatgaaatattggaacaggcctgcgataccgccctgacctatttgcgctcacttccagaacgccccgttagcgcaccggcagaaagccaacgcattgcaccgggcgacgacaaactttctgaacaaggcgtgggtgcacagcgggcgttggcacaattctggcatgatcatgccgaaggactctctgccagcgccggaccacgttattttgcctttgtcaccggcggtggcacacctgctgcactggcggccgactggctggtcagcgcgatagaccagaatacccagctcagcttcgactccgtagcttctgcactcgaggttgctaccctcagccagttaaaacagttgctcgggttaccggaaagcctctgcgggtccttcgtcagcggcgccaccatggccaacttcgtcagcatggcaatcgcccgccagtggctgggcctgcagcgcggcgtcgacgtggcgcaacaggggctgcatgctctcggcccccttcgcgttatttcggccgccgcgcactccagcagcgtaaaagcactcagcatgctgggcatcgggcgtgatgcactggttaatgtcgccaccttgccggaaagcgaagctatcgatcccgccgcccttgaacagctcttgattcaggactctgggctgccgacgctggtattggcgagcgccggtacggtgaacacggtggccttcgatgacctgcctgccctgctggctctgcgtgaacgctttgggttctggttgcacgttgacgccgcttttggaggagtagccgccgcatcgccgcggtatgctgcgcttctcgagggctggcagcaggccgactcgatcactattgacgcccacaaatggctgaacgtcccttatgacagcgcggtgcagttcacggcacagcagcatctggcgcttcaggtacaggtctttcagaaccattcagcctatctggcgctgccaagcgtcagacccgacaactatctacacctgactcctgagaactcacggcgttttcgcgccctgccggtgtggatggcgcttaaggcttatggtcgcgccggaattgccgaaattgtcgaacgcaacgttcaactggcggcgatactggcacagggccttgaggcgacaccgggccttaccctgcttgcccccgttttgctcaacgtggtctgcttcgcactcgattctgcgagtgcctcagcggaggaaacggcgaaacgcgatcgttttcttaaattgctcgatgcggcaggcgtggtccgttgcaccccgacgacgctggcggggaaacccggtattcgtgccgcgttggtgaactggatgacggaagaacaggacatcaaacgggctttgcagtcaatggtgcagtgcctaaaatccgtgtgacactttttagggcacggcaggcgtaaattaatgaattagccatttaggaagcgtttaagataggtgaataatttttaatcaccctgcttacagatagcctaacaactaatcgtttgccgtgttaagtaaaacctttcgaggttattcatttctgctatatccctgcatttgctgagcttaacagtaagcatctcttaaactctcaatctaacaacggttagtcgaacttaagctaaattgatatggcagaggtaaacgggtttacctcgaaaaaatatctttgtaatcggcgccgttttattgcacaaaggaatagtaaggacgcctaatatttagcttttcttacttatagccctctaccctaacaatcattatgcaatacacggatgtctgccgaggactcagactatgcaaacgattatttttgaatcatgtcgttttactcgccttggattgatacattcacttgccgttaatgggattggtagtcgggaaacttcctatgcaaactccctggaggatcttcagcgcagctgcgaacatccgataccgaggatcattttaatcaatgagtcctgcctgcccatacagtcgcaaagcagcactattattcgcaacctgatcgttgaacatcctcaaagcctgttcatcatttttatgtcaagcaccaacaatcacttcgagcaatacgtctttgtccgcgagaatgtgattattacttccaagtcgattaaaacggccacgctcaatcagctactgagtcaccacgtacggcagtttaatctgaccggaatcggagacaatcggttaaatatttcgccggtggtgctgagcagaagtgaatccaacatgcttaaaatgtggatgtcgggagaaggaacgacgcaaatatcggacaaactgagaatcaaggtaaaaacagtgtcgtcctacaagggaagcatcaagcgcaagattaaaagccagaacaagcacatcatttaccacgtggtgcgtctgagcgactcgctgaccgaagggatttatgtgagttaatttcgacagtggctcccatccagggcgttaaggcgcattgatgggagctaacgaggcggaataatttgaaagtcaggcgtctcgcggctcgacaaaagtaccgtctttgctctgcgactcattgaagaaccaaattcccgccggataatcctcgagagcaaccaagtacatcacgccctcgtaaaaggtttcaacttccaaaaccgtcccttcacgacgcacgccgccgtcggttttaactgtaaccagatcgttaaccttcattatttgccccatagtagagagttggcagagcctgttttcgctctattttattctagactataagtgcaatgaaatgattgagcgcaaggataaagcgaggaatgacaaggagataaattgcaggcaataaaaaacccgccttagcgggtttttgtaatctactttatgcgctgcaaaacagcgaataagtgagattagatagcggtaacgttagccgcagacggacctttagcaccgttctcgatagagaactgtacgttctggccttcagccagggtcttgaaaccttgatcctggatagcggagaagtgtacgaatacatctttgctaccgtcagcaggagtgatgaagccaaagcctttagactcgttaaaccacttaacctgacctttcatcatagaagacatagaattaccttttaaatataaatttcgccaccatgggcatgttatagccggatttcagtcgttacttatggaggcactaagaaggaaattcgtcagatcagtgttatcgaggataacgcattaaattggaacaactttactcaggatgtcgtgcataaataggtctgtaccacaggccgagagctatttactcatgactgccgttcaatagcaactctttttaacagtaactggaagtaattaccctattttgtcgatttaacacccacaacggtgaatatatcggcagctatgcctctgttttaactccagttgcagggaaaatcgtggccagaaattgaaaataaaaaaacgctgaacggttttaaacgcacaggcaggcgataaaaacattcagcgtcggggttttgcactgcgttttgaagcgcttactccatcatttccgaaacggcatgacgcacataggcggtgatttgcgccaagtcttcggctttggcgctatcgccaccaatagaacgtacccgattctcgagatggccaatatcctgttcaaccttgtgagcgatttgtactttaacaatggtatcaacagaagaaataaatgctcgcatcactgctttgagcgcataaatctcagagaacgaatcgtaggccggcttttcagcgggcggcgcgctattgctgctctgctgcttatcacgcgctgacaggttcttcaggttatctacatgttcaataatcagatctatatctctgattaattcatcaaaattcttagccactgattttccttcgctcggcgaaagcagaagaataccactgcggcaacaagccgagaagtcagcaaagaggggaaaggtgaaatttagcgaagaagcgcccgccttttacttgggcaggcgctttaaacctcaaaaaacgagcctcagcttaggcttaggcgtttttcagtgaggccatatcgataacgaaacggtattttacgtcgctgttcagcatacgtgtataagcttcgttgatctcgtccatgttgatcatctctacgtcgcagccgatgttgttttcggcgcagaagtcgagcatatcctgagtctcggcgataccgccaatcagtgaacccaccaggctcttacgacccatgatcagtttaccggcgtgaacagcaggctctaccggctcaatcagacccaccagaatgtgcacaccgtcgcgcttgagggtgtccagatacgggttcaggtcgtgctgatgcggcacggtgtcgagaatgaaatcaaagtggttctgcacttctgccatttgtttttcatcggtagacagcacaacatggttagcgcccagacgacgtgcttcctgctctttgcctgcagaacgggtgaacagcgtcacgtcagcacccatcgcgtgtgcgaatttcaggcccatatggcccaaaccgcccagaccgacgatagccactttatggcccgcttttacgccccagtgtttcagtggagagtaagtggtgatacccgcacacagcagaggtgccgccgctttgaagtccagcgcttctggaacgcgcagaacaaatttctcggaaaccacgatctgctcagagtagccgccgtaggtcatcatctggtcgtggcggtccagactgttgtaagtcatggtcgcgccttcgaggcagtactgctccagattggcttcgcagttctcgcagtgctgacaggagtcaaccatacagcccacgccgacagaatcgccgactttgaacttggtgacttttgagcctacgtgcgtgacgtggccaatgatttcatgccctggaaccagcggataaatactctggtgccattcgttacgcgcctgatggatgtcggagtgacaaacgccacagtatttgatgtcgataacaacatcggtatcacgtggatcgcgacggacaaagttatggggtgccagctcggtctctgcggactgtgcggcaaaacctcggacgttaagagtcatctgttttctcctgagggttaacgaaatgaattctggcaacggtcatgggaccgcaaccgggctaaagtatgaagggtaataaaggaatatcgttataacgatcctcgctactacttgcctaaagctgtttttttcgagatttttggttaagcgctgcgcaaccggcaggcttaaccaaaatttgtgacgcctcgatcaggcgcgggggtgaccggtatctgaacggacgtcagataagtctggcggctttcagctcactcttgaggtaagcatagtatatgggtgcggcaacgacgccgggaaggccaaatgcagactcaaaaatcagcattgccagcagcacttccaggatttggcgttgatgctggtgcccacgatgcgcgcgttgaggaagtattcaatcttatgaataataataagataagccagcaccattgcaccgacccacagcgagatcgacaatcccacgatgcagatgacagtgttggagataaggttaccgacgaccggcaacagccacagacaaaggtgaagaccaccagcgttttcgacaacggcaggtggataccaaacagcggcatgatgccaaacagaaacaccgccgagagcacggtgttgatcaatgaaatctgaaattgggcaaacaccacgttgcgaaatgactgactcagcaggcgcattctctgcatcaaatcgctttttaacggcgcacgctgatcgtccgacccttgcctttgcaacgagattattgccccgaggatcatcccaccagcatggtcaggaaagtatgcgcggcatttttacccgccgtttgcagcatcacgacgtgctcgcgcatccactggataaactcgcgctgaagctcctcgagattcgccggtaaatagtgcagcatcaccggtgacagacggctctgcgcatcgttaagcaactggcttatcttgttgttgaaggccgcagggttacgcacgtcatgcagcaggaaggtcacaatgcccatcaccgcaagaataagggcactgaccacaatggtgcttatcaacgccaccaccagccagcgtgcccgctcgccgcgaatgattttttggaaatagggcgtcagcgcattcaccagttcatagacgatgaacccagagatgaaacaccccagcagatgaagcggcagaatcagaagcagcccgcccatgataacgagcaggctgagccaacggatgtgatgcggtctcaatatttgcattgctgcatccttacataaatagataacgggaagcgttcccggcctttacaatcatcatagcacctaagtttcaacggcatagataccctcgcccgcgctcatttttttgacatggttttttcatcccctatcataaagacagcaacgtgaaccaacaggccaaataatgaccgatttaatccgtgacaaactcgagcttcccgccgggcataacaaacttctcctgcattcctgctgcgcaccctgttcaggcgaagtgatggaagcgattcaggcttcaggtatcgagtacgcgatatttttctataatcccaacattcatccacaaaaagaatatctgctgcgcaaagaagagaatattcgctttgccgaacagcataacattccttttattgacgcagattacgataccgataactggttcgaacgcgcacgggcatggaaaaagagccagagcgcggtattcgttgcaccatgtgctttgacatgcgttttgagcgcaccgccctttacgccttcgaacacggttacaccgccatttccagctcgctgggcatctcccgctggaaggacatgcaacagattaacggctgtggttatcgcgccgccgaaccttatcccggcatggtttactgggactacaactggcgcaaaaaaggcggcgccgcacgtatggtcgagataagcaaacgcgaaaacttctatcagcaggaatactgtggctgcgtgtattcctgcgagacaccaacttgcatcgtaaatcacagggtcgcccgctgattaaactcggcgttaaatactacggtgacgaggaggaataagacctcaaacgccgactttttctcctaaaataatctggctgccgcgccagattattcttccttcttatgacccgccccgcaatatcattaattcctatgatttccactttttagaaacttgcttaacgcgcccctgcttgttactttccggacgtacagatttttatgcactttccattaagtgtactaataaaaaatatatatctataaatcatattgataaaacacgaaaccatctaaaaacagatcttttttggacaacaggggatagaaaatgtgggttcttattggcattccaatcgtggtgattggctttgcgctgcggtttaatccgctgctggtggttaccgtcgccggtatttcgaccggtatcgcgggcggtatgcatacggttgacatcattagcgcttttgggaaagcctttaccgataaccgttacatgggactcgtttggttaacactgccggtgatcgcccttctggagcgcagcggactgcgggaacaggccaagcaccttatttcgaagattcatgccgctaccaccggtcgcgtgctgatgctctatttcttcattcgtcagatgaccgccgcattgggactgacctcactcggcggtcatgcgcagatggttcgcccactcattgcgccgatggccgaagcggccgcgaccaccaaatacggcgacctgcctaacgacgtgcgccaaaaaattcgcgccaacgcagcggcggttgataacattgcggtcttttttggtgaagacatctttattgccgtgcagtcaattctgttgattaaaggcttcctcgatcagaacggcgtcttcgtcgagcctttgcacctttccgtctgggccatcccgaccgccatcgccgcgctgattatccactttattcgcctctggctgctcgaccgctcgctcgccaaacgttttaatgtacagcagggagcctcggcaaatgattaccttaaataccgtttatattattgccggtttactgtttattggcttcgcttgctttaatttacgcgaccgcagcaaccctaagcgttttgtcaatgcgctgttctggggcatttatggcgtcatcttcctgttcggaacagagataccgcacttcgttacgggctgtatggccattctgctggcggttatcgccggtaccggccagctgggcaaaggcaaaagcgacgctgagcaacccgaggttgcagcgaagcgccaggccagcgccaaacgtttcggcaatcgtctgttcatccctgccctgattattccgttagtgaccctgattggtaccttgacgttgaaatatgctccgtgggtcgaaggtaagaacgtcacgttgatttcgctggtgctgggtacgattgtcgccttcgtggtggcgctgttgatgctgcgtgactcaccgcttaaagcgattaaggcaggcgggcaaatcatggataccgtcggctgggcggcgattctgccacagatgctggcggcactcggcgggctgtttgcgctggcgggcgtaggcggcgtggtcgctaatctggttaaagatgtgattccgatgggatcgccgcttgcgattgtgattgcctacacctttggcatggcattatttactatgatcatgggtaacggctttgccgccttcccggtgatgacggcgggattggtttaccgctgatcgttcatcaattgggcggtaatccggcgattatgggcgcaatcggtatgctttccgggttctgcggcacgctgatgacgccgatggccgccaacttcaatatcgtcccggcggcgctgctggagttacaggacaagcacggggtcatcaaggcccaggcattgaccggtattttgctgttgctggttaacaccgcgtttctgtatttgtttgtgttccgtttctgataaacggaacatcatggagtggatgacatgacctcgcaacagcccctgcaactgacgccagaaatggcgtcacgctttgcttcactggcgttaaatcatttaacccgtgaatatcctaacaagctgactcacgcgctggtcggctcggatgatgcccaaacgccacgtgcgctgcatccgatcttctatggcagctacgactggcattcctgcgttcacggctactggctgctgctgcgcctgctggaccgttatcctgacctgcccgaggcgagcaaaattatcgccgtggttgagacgcattttactgccgagaacgtcgccggtgagttgcgctatttgcagcaaaaacatcacagcggttttgagcgtccctatggttgggcatggttcctggcgctggcgcagcagactgacgcgctgtcgttaccgcaggcccgaggctgggccaagacgctgtcgccgatgaccgagtttttcgttaaaagcttctgtgagtttctgcccaaagccacctatccgctgcgcgtcggcagccatttcaacaccgcgttcgcactctcgctgacgctggactatgcgcgcagcgcagggcgtaaaaagctggcggcgctgatagaagaaacggcactgcgttggcatctggaggacgtgaactgtcaggcgtgggagccgggcggcgatgagtttctttcgccttcgctgatggaggctgaattgatgcgtcgggtgctggcccccaggctttcattacctggtttggccgcttcctgcctcatctggtgcagggacagcccgagacgctgtttaccctgcgacggtgaccgaccgcactgacggcaaaattggtcacctggatgggctgaatctcagccgcgcatggtgccaacgctcgctggcctcggcgctgctcaaaggagacccgcgcattgccctgctgaacgcgtccgctgacgatcacctcaacagtgcgctagaacatctcgacagcgactacgccggggaacactggctggccacctttgccctgctggcgttagaagcctgatattttaaatagacgcctctgactttgagtacagaggcgttttcccttagcgcacaatcccgcgcgttgagcgggcaaagaaccgttcaaagcagctcagatgcggatactctttctgcatcagcagcaacgccgccttgacttcattcagcgcgtcaccgccgtgataaagctgataataaaggacgcggatcacctgccgcagatgttcgtcctcaaactggctcgtcagcgcgtcttcattgacgctgagcgctttacagcggttgccctgtacccgcgtgaacggcgggacgtcttgcacaacacacgaatgggccagcacctgtgacgcataacccaaaatacaaaactggtgcacggcagaatgttcgtcaacctgcccgaagtcatcgagctcaacgtgcccggccaacgcggcacccaaggcgagatgcacaaagctgcccaccacgcagtcgtgaccgatatgcacctgattcataaacacgttatcgttaccaatctgcgtcaccccggttccctgaaccgtgccgcggtgaaaagtggccctttggccaatacgattgcgatcgccgatttcgaggcgcgttggctctcctgcatacttaaggtcctgatttatctcaccgagagagctgtacctgtcgatcaggttgtcgcagccgatgcgggtgtgcccgttaatgacggcatgggaaagcacaaccgttccctcgccaatctcgacgttcgcctggatatgacaaaagggtccaatgcgaacgtttgcgccgatccttgcgcctttttcaataatgctgtttctcgccacaatggcggaagagtggatcatttaacggaaccttagtggaaaaagactaatcaaggagggaggatagagataaagacgaggcaacccagcatgctttaatttatttattttctgaactttatggacataaagtttcatttaatattcattaaggttacgttaacgttttattaaggctttcttaagcttgaggctttagggtgtgccgattctgcttggtgccactcgcactccggctgattttcttgggcatatttgccggacctgagttttttggagaccgttttgcgtaatttcatccctaaaatcagctatttttggctgacgttactgattagcctgtatttcacatttgtcgttaacttccccgttctgcttcatttctatcaaattttacatgcgctgccggcgtataaaattggctttgccatctcgattcctttcgttctgtttgctgccctgaattttgtgtttacgccgtttacctttaaaccggtgtttaaacctttctttatcatcctgttgctgctcagcggtctggcgtcttattcggagctgacctaccacgtggtgtttgaccgcagcatgattgaaaacattgtcgaaacgcagcagagcgaagcctcttcctacctgaacacctcggtgatcgtctggtttgtgctgaccgccattctgcctgccgtgctgctgttcctggtgccggtcaagtacaaccagagcgtgattaaacgccttggcgtacgtattctgtctatgctggtgtctctcgctatcattggcgctgtcgcgagccagtattatcaagactacgcgtcggtaggccgcagcaaccgcacgcttaacgtcgagatcttgccgaccaacttcctttacagcagcagcgaatatttctatcacaagtatctgaccaagccgctgaagttcgagaaagtcggtaccgatgccaagctggtgcagaaaccagggcaaaaaccgaccttaatgttcctggtaattggtgaaaccggccgcgcgcagaaccagtcaatgaacggctacgacaagccaaccaatggctttacgcagaaaacgtctgacatggtgttctttaatcacgtcagttcctgcggcaccgcgaccgccgtttccgtgccatgcatgttctccgacatgaagcgcgtcgactttaataacgaccgcgctcacgccagcgacagcttcctggacattctgcaacgcgccggtgtttccgtttattggaaagacaacgacgaaggctgtaagggcgtgtgcgatcgcgttccaaacgtcaccattccgaccaccaaagacggcaaattctgtgacggtgaaacctgttacgacgaagcgctattggaaggaatagacgacaagattgtcgacgacggcaagaataaagtcatcgcactgcacctgattggcagccacggcccggcttactatcaccgctacccggacaacttccgctactttatgccggactgcgaacgcagcgatattcaaaactgtacccacgaacagttggtgaacacctacgacaacaccgtgcgctacaccgactacgtgctgacgcaggttatcgccaaggccaaaaagtaccaggataaatacaacgtcgcgatgatttatctgtcagaccacggtgagtcgctgggtgaagacggtctgtatctgcacggcacgccctacagcgtagcgccaccgcagcagacccacgtgccgatgatgttctggctgtcgccacagtatgtggccgcgcagagcctctcactgagctgcctacagtcagaggccgcgaaaaatgattactcgcaggataacctgttccacaccgtgcttgatgcgatggacgttaagacctcggtcatcgatccgtcgctggacattctgaaaagctgtaaaacggcgcagtaattttacctagccaatccgacgctcaatctccgcaacaaaggcgttgagcgtcgggtcataacagtgctgtgcgctgttataggtcagatacagcgccgttttccgcaacgagtttccgtccagcgcaaggcgcaccaactccccgctttccagccgcgcagacaccttatgcagcggcacccagccataccctaccccatgcacgatagcctcgattgccgcctcaatagtggtaaaactccagttcgccgtctcataggttttgcgcttttcatcacgctgcgaatcgcggtcaacgatggtgattaacggaaattgccccagctgcgaggcgtttatcggtatcttaagagacagcagcggatgcccgtacgccgcaatcggcacaaactccacgtccatcaaccagcggctattcagcgtattttcagcaggctgcgtggtgatatagaggtctgcatcgcgcgcctgtatttggcgatcggtttcgttacgcaggatttcggaaagctgaagctgggtatcgggaaaaactttctgaaaggctttcagtgacaggaacaggctatctttgggaaacaccgcgtcaacgaccaggcttatctgcgttctagcccctgctgcaacccaccgcccgcgcctccagttgaatgaaggcagaaatcaacggctgagcctgcgagagcagcgcgcgaccctgctcggtcagctcggccttacggcccacgatatgcagcagccgcagtccgagtcgttcctgcaggctcgccagcgcatagctcaccgacgactgactgcgaaacaacaccctggctgcctcagcatagctgccttcgttaaccaccgtctgcaagacgacccattgctccaacgtggtgtggggagttccatcgcacaatcccatctaaaaattagattaatatcatcgtatatcagcgttattcaatctaatttacaaggtgtagtttatttccagagccaaaaaaacctgaatttatgccctttaaggagataaacatgagcagctttgataaagaagatttgagcggttttgtcggcaaacatctggtttatacctacgacaatggctggaactacgagatttacgttaaaaatgccaacaccgttgactaccgcattcacagcggcatcgtcggcaatcgatgggtgaaacaccagcgcgcctacatcgtgcgtgtcgcgtcagaggtatataaaatttcgtggacagaaccgaccggcaccgacgtgagcctgattgtcaacctgggcgataaagtgttccatgggaccatcttcttcccacgttgggtcatcaatgatccgcaaaaaaccgtgtgtttccagaatgagcacatcccgcagatggaagcctatcgcgatgcaggtccggcctatccaaccgaggtgattgacgagttcgcaaccattacctacgtccacgacagcggtgtgaataacgaagcggtgatcaactgcccggcgagtgagcttccggccgatttcccaaaaaacctacgttaatatcctgccaaaaagagagggaacccgtccctctctttattgccttctagcgcagcacgttaatcagcgactgattaaacttctcaggctcttccatctgcggcgcatgccctaatcctttgaattcaatcagtttcgcatgcgggattgatttcgctgcctgcttgccaagcacgttgtaatgacccaggcgcgccttcaccgcaggcggggcgatatcgctgccgatcgccgtagtgtctgaggtgccaatcatcagcgtggtcggcacgcgcaggtttttaaactcgtagaataccggctgagtgaagatcatgtcgtagataagcgccgagttccacgccaccagcttgtgccccggcccgttgttcagtcccgccagcatgtccaccagcggtcgtattccggcttccatttgccaacgtaataagtcttcagctcatagtcgtgaatgctcttggcagaaagcttcaactcgcggtcgtaccactgatccacggtgcgatacggcgcgcccttggccttccagtcttccagaccgatagggttaaccagcaccagctttgagacctgctgcggatacatcagcgcatagcgcgtcgccagcatgccaccggtcgagtggccgacgattaccgccttgttaatctttaggtttttcagcagctcatgggtattggccgccagctgctgaaaggtgtattggtaatgctcaggcttggtcgatgagcagaaaccaatttggtcaggcgccacgacgcgatacccctggcccagcaacgccttgatggtgtcgccccaggtcgcaccgcagaaatttttgccgtgcataagcaccacggtctggccgttctgccggccgaccggcttgacgtccatgtagcccatttgcaggggaacgccctgagaattaaaggaaaagtgttggaggggataaggatagtcgaatccctgcaactgggggccgtaagacggtgtatcggccgccatcgcgacgcctgaggtcagtgccagcgctaaaaaagaggcggaaaaccgttttttcatcgaaaagagcatctaaaattccctgataaatagccaaactgaggcataaaacacggatattaaggagtttagcttaaggattgaatcagaaatcgtaacatttttcgttttcccgccgctttccgcccgcattcctgtcatgaaaagagcgcgtaaattgtgagaaactgctacgacgaaagcaataacgtgagctacgtttgataagatgaacgctcaagtagcatatgctgccgttactggtaccatccttcgggttttgggcaactaccctttataaccttttgaatgttcacactttgcgagcaagatgatgatcaagtggccgtggaaaagtaatgaacttaagattgataaaagcgaagtctggcagcaggcgctggatatcccgctttttctgattttaataaccatgaacagcagcggctcattcgcgttgccacgcacctattgcagcacaagcggctcatgcagcttcaggggcttgcgcttgacgaaaccatgcaggccagaatcgcactgctgtttgcactgccggtgatggagctcggcgcagagtggctcgacggtttccatgagattctcctctaccccaccccttttattgtcgataccccttggcaggacgaaaacggcattgtccattccggtacccaagtgcatgcgggccaaagctgggatcagggccctatcgtgcttaactggctcgacgtgcaggactctttcgacaagtcaggctttaatctggttgtccacgaggcggcacacaagctcgacatccgcaacggcggcgaggcgaccggcattccgcctattcccctgcgcgaggtggtcgcgtgggagcatgacctgttcgcagcaatggaaaatttgcaggaagaaatcgacatggtaggcgaagaagctgccagtatggacgcctacgccgccaccgactccgccgagtgctttgccgtgctatcggaatattttttcagcgcccctgaactgctttcggaaagattcccgctggtttacggacattttacccgtttctacaagcaggacccgctgatgcggcagatgcgcggcaggctggcggactgttaatatctttgcattttaatatctctgcatttcacgggaaaaaccctataaaacgccaccaacgcactattctgctcaggagatgagcagtcggacgcaggaacgcattttcgcgttgacactcccgctctcgctggatactatgcgccccgttcacacaattcctctgtagttcagtcggtagaacggcggactgttaatccgtatgtcactggttcgagtccagtcagaggagccaaatttagaaaagcccgcacaaggaaacttgcgcgggctttttgctttttggggattattgaatccctggcagatttagattttatccataacgatgtcgtgttgagggtgttgacggtatagcgtcaatgctttcagccagaaggcgatatagatttcgagcggtatacgaagccgtcagagatctgccacaggctgtaacagatcaaactctgggttttttcccgtgtcaaaaactgaaataccgcgtggttttaccggctcccttgggtacatccagagcaacaaacagctgacgattcattctttaaatgacggttgatatacggttcttataaacgcgtcagcgcgaatcggatagagggctattatcaacagacactgataaacattctggcaatggttctaacccactcgtttaaaaacccaggatcacagccgtttatggtcatagcccatattaaggcatgactaatatcgcgatgtattaattaacggggcttagggtatttcatctcgcttgttaatgctcatattcgtcagcaacgtgctgagattcttagattactcgccgatataatcaatcccgtctgagtaatgatcgggcttttaagacgcgcttccaaacagtcactgacaaaccattacattactagatgtaaaaatctataaattttagtttgtttcagataaaccccgcctcctgcattacataaagttctacctaattagtcttcaacactacattaggaaatgtcatgaaatattcaaggaacgaaatctctaaaacccgtgcctcaacggctctttcaggagtgtgtgcaacctcatccacaaatccgctgaaaactacattattgcatgagcttgcgattgatggtttttcgtctatggcctccagccctactatcgatggggcttatccactatgacacggatgcttatccccacgccggtaaaacaggcaaccacgggcaacactgccttgctaatacaccggattaatcaggttcttaaagacatcctcaagggaaccggaaaaaccctcggcaacctttccgtagaggctggctcaaaagtagtatttgaatttcacaacgttcctcccatcaccctttccttgaatgaaggacacatctggctccagacgccgcttatctggagggacgagttgcattttgctaaatctgcaggtgcccttctggaggtactgcagtatccgctgccgtgggtagtgaccgaccagccagtgctaggtcttcgtggccgggagctgcgggcgctggttgatgaatcgtgtttcgtcattgatacccggttcggagaacttctcgacgccttttatttacgcagttgccgtctgcaacagtgcgtaggcgaatactccaggccgtaaatctgccagtcccttcccccattttcataaaaaaaagagaaatacatgaacgaagttaacctccgccgtgcggatgtctccacgcaggatacccacaccactcaagcttccaaaatagaacagaacagacagctggcgcatgccgaatcttggatggataagctgtcatcggtgttttcgaaggcagtagcttcatttaccaatccaccggtagacgaggataaagcaatgaaacagctgaatgatttgtttaaagagctcaaaaatgatgccaaaagcccgcttaccggtggaacagaacattcgctgagtttaaaaatcgaaatggctctgaggaagcacaaaacagaggcgcagacctcgttatctgacccagcaaccttactgcgtaagatgttaacagaggagaatctgattaaggtttccggtgggcattggttcgatggcctgcatcttgacgtcgggatggatcatctgttcgcacgcattgtaggagcgaatcccaaggatgagaaagcgatggcgaaaattgaacgcatgaatctggaacaaacaaaacccgccttgtatcaatggttatcaaaagaggtttatgcggccgtggcgaagggaacgccgtccaaagcggatatacagaaaatcggcatgtcatatattagcagtgccggcgtcggcatggcgctcggaagcctggggccagtgggcaccggtctgtcaatcgcctggtacagctgccagattttaaagcagctcagtcaggaaggcctcatgaatacggtcaactcccagatgaaggcccagctggatacgtggatgggggcgaaaatggcaggagggttgtctctgccgcggatgacctggaactctttacccatcttggagactggttgagcggaattacccctgagagtatggctggcagaatgaacacccaccagcctggagcaacgatggctgataccggaggaaagggacccgaacttacgttactgactgcgccgacaatcagtggaggcgagaaggtcgccaagaatgtagatgccgaaggctggatagcaaacagcgtgcttaactgggaaaatacggacgtcgctgaaaagatgctgatgaaaataaaaacctgttatgaattcctgcttccggaacaagatacagccccagaggtgtgttcaagctcgcccaacagtgcaaatactaccgctatggcaccgccaaccaagatggtgaagagtgtcgtggaagagggaatggcggagaaaatacgcgtactggacggtgaggggcagttgaaacaacgcttacggctggccaacgctgacactcccgttgaactttcaaatgccaaagtgccaaataagatgtccggcacggtagctaccactgtcgcaccttcgaggtttcagcttagacccgagaaatcttcgggcggagaaacagcggtctccccgacaggaagcaaaatagaaaacacggcagaaagaaccaatgcggctttggcaaagaagcctgacgaggaaatgctgttgcaagaaataggccgcagttttgtatcgccgaaggataatttgcagggtgtgaaaatagtcccaacaggtccgagttctgtcagcaacatgttgacaaccctggcagtcactctggtggcgggtaaggcagccggagcagtagctttcatggcgcagcagtttaagacggccgaaagcaaaccgacctctctgtcggaattagcaaataaaaagcctgagccggaaaatctctttgttgctaataaaccaataatttatcaggcactcgactctctttccgacaatgtgatacgaactgccttggcagaacatcctcatgaattaaatgaggacaagttacatgagctttattcatatgcaaaagaggactatgcaaaaattatcattaaggggattgcctttattgccgaaaattatgttgatagtaaaattattaaggcgattcaacaggcaagagtaagtgctaacctaactgatgacgttgcattggtcgatatgttaaaagataagaaatttatcgtggaaatttctaagatgctagcgaagggagagtttgaacatccttctcttcaggcctgcaatctggaaaaactaatggagcccatcctctccagaacaccagtaatggcatttgatgtagaacttggtttgaattcagagtactcaaccaggttaacagacaaaatcgacagctatttcttcccagatggcggagcagaagtgaaactggctgcgatgaaagctattaacgaaaaaataaaatattcgataatgcaggtgtgtcaaaatgaatattctaaaatgcatgagggcgtatcgaatcaacacatttttaacaagtttggtatgaacgactatgaatattggtatacggcgaagggtgcagccaaccaagttcaagacttatcgagttcaattacagatgcagaactgaatagatatattttatctgcggcgaataacactgggaatggaactcctattccgttaaataaatatgctgagcttgttgaaagttttaataatgtaaaagccaacaccgtagactatttaaaaaattataatatcaatactttggtagatgaaattgtcctagatgagataaggaaaatacccacactacaaaatgcgaatcttgatgatatagtatcgataaacgatcttactaaaaaaaaggatttgagtttaaaagaagtcgcgctaggtgacatatttagaaattatccttcttctagatatatagccatctttagtaaggccgacgaaaataaaccctatcacaaacacgatgtaaacttaaaagaatcattgataaagcttgcggatcgcgttgaagtcagacttgaaaaaaccattagaaataatttatctcgacctgacgctgaaagtgtagtgaagaattttattgggatttcatttaagactcagctaatagattacatgaaaaaggcgtctgtagaagactcacgagagttcggccctgccattaatgatattctcgcaggaacaacgaaacctaagttaatggcaatgctggaatatccaatgtctaacatcattgcactaaaaggaataggtgatcgctatcttgctgtctctacgttgacacaagaatctaagatcataccaaacagacagggattggaaaatgaccagagtttacaaaattggttattgcaccacttgtctttctatgactctcaaagaaatatggttaaaacgtctttcacgccaaaaatgctcgatcctttatatggtatcacgcattatgaatacccggtaaaatatagtgaaacgggtgattacacgtcagacttgactcagcgtcatattgacagattgagatccgatccggatgttttaataaaaactcactttgaacaagaagttgatactattctttccgcaggtatcggtgctctagggtttctgtcagtgggagtgatactcacaccggccagcgcactgggggcattttgctcagcggccatgggtatgggtatttcagcgatgcaagttgcgaagtactttgtagcagatacaccagatgaaaagatggatgcgttgtttgaagcagtaatgagtggtgtatttgatacggctctagagataactcaggcgataaaactctttcgacagcagatgtcatcagcgctaaaaagtggtttgaagaatacacccaataatttcagtctgccagattcaaaaataaatattgcacctaaacccgcagattatagaaaagcgaaacctattgctgaaggaacagcggcaaaaatttacagtgtagacgattacctgattaaagaatttaagcgccccttgaaagaaggtgacttctctaaagatcatttattattaaaacaatcaaaaacaaacagttattcggggcattgcgtgaggcaaataataatgccgtcgcattcaaccgtctttacggagagggttcatccgtcgtcttcattgataatattggagattctaaaattgtttcgatgaaaatgcctaaaataccgggtgaatctttacaatccattctaaagaatgacaatttacaacaaatgaaaaatatcaggaaatcactgagtgatgaaaatactatacagtctataatagatcgtacacttgctgatttgaaaaaaaatggtattatgcatgatgatatcaatcttgcaaatatcatgttcaatccagagactgacaaattcactctgatagattttgaccgtgcaagaataagccctaaaaaggatggactgatcccagaactgtctgcttctcagatgaacccgatggagaaaaagtttaaagctgatttaaatgaatttaaacgaagtattgataaactcgagaaactagaaaataattccatcaaattggatttcgataatctggacaggaaccgagatttgatcagaacctgttccctcttataacggcctccagacaaacacggggagttttatcctgtacagagccaagccctgattttttaaaacttccgcctttggttaatgacagagtacaacttatcgatgctgaattcgatcgactaaacaaagcacttgtaagtcgcgatgccaagcctacaaatcacaatgacattttcaccactactgtaaccaccctcaaggaccttgaaagcttaaaagacccaaactatcaagccaaatttatatttgtaaaaaatgccaaaggcaatcagcaactaattatcggcggcattggtaagaaaactgacgtaaaaacgatttcccacccttctttgctaacagaaataactattgataatagtaatttggagatacaatctgctggatacataggtatgacaaaaaaaggcgtcgcttatttactcaatacttcaggacactataaacccacttacgaccatttacgttcagctcagaattttcttaaagaggttgtgggtgttgaaaatgtccataaagttgagtccttcactattaaacaccaatggctaaaaaggattgataaagtctttctttgattaccaggaagaacataatagttaaaatactaaatttatttctggccggatattgaaagcttgagagttatcgttttcccaaggtgtcgaacccttataaaaaaatgcgctaactctcatgactcatactaataagcccttaatagaatattggatcgacatttttattcctcaatttacaaatacctatggttgggtaaatttgagacgctgttaaatctgcaacaggatgagcggtaccagtgactcgcactcaaacgacatcacaaatgataatcattatcatatcaagccagtattggcatcaaaacaggcactccctcccctcaaagagcagaggagggaggttgctgcggcaggtcgaatacctaccctaaaactaactcagcgctaatttctgcataaccgccgcaatatcggcccgcagtttctgctgtaacgccggtttttggtgtttcgccttgcgcgccagctcatcctcaagcctctgctctagctcacacagccgcgccagcagcagatcctcaccggagagcacggcctcttcgccctgctccatcggcgttggcggttcgggttgattcagcgttttgcctgccagcagctgatacaccggctcaagctgatgccactcctcgaggcgatggtcgtgcaccagccagaagcggttgcagccattttcgatcaacgttcgatcgtggctaaccatcaataccgcgcccggaaaatccctcagcgtctgggccagctcttccttgccctccatgtcgaggtggttagtgggctcatcgagcagcagcagcgaataacgtgccagcgtcagcccaacgaacagcaggcgcgaccgctctccgccgctcagcgaagccaccttttgctgatgacgaagatacggaaaaccagcgccaatgagcgccatcttgcgccgatcgtcggttaaaggggcaaaattaccgagcgcatcgcataggctatcgctgtcgcgaagctgatgcagattctggtcgtaataccccactgccgcacggggatgccagctgataccggattcaggttgagtgagcgatcgccacagcaggcgcagtagcgacgacttaccgcagccgttacgccccatcaccgcaacgcgatcgccacttttcacccgcagattatcgagggaaaacagcgcggcggcgtcgggcgctggcgcaacctccagcgtttccagcgccagcacgcgatcggcgtcgagactttcgccctgcaactctagccgccaggcattggccgccgccagcggagtctggtcctctttcaacctgtcgacctgtttctccatctgcttagccttgcgggcaaacttttcgttgtcataaaccttgccccacagcgccaggcggctggcgcttatctcaacgcggtcaatttctcgctgctcggcctggcggcgttccgcgtcggtgctgtcgcggtgtgctaacgcctcgcgtgcctcactgcaacgtagcccgaaatagtgcagcgtcttgtcacgcaggatccaggtacaggtcgttacgctgtcgagcagcgccacgtcgtgcgagaccagaataaagctgccgttccattggcttagaaaatcgcccagccacagcagcgtcggcaggtcgaggtggttaccaggttcgtcgagcagcagtaaatccggctcgagaatcaacgctctggcgagcatcaaacgtgtgtgctgtcctccactgagcgtcgaaaccgtctggccccagcaggaaggcgtaaagtccagcatcgccagcaaccgctcggcgcgccagctctcggcaagccgctgattctcgggaagccggtcaagcaccaccgccaataggctaagcgccttcagggactcgggcagatgctgttcgatggtcgccatcaggcactgaccggcgcgggtcaccgaacctgagctcgggctgagatggccattaagaagattgagaaaggtacttttaccgctgccgttatggccgattaagccaacgcgatcgccttttttaagcgtaaacgaaacctcagtcagcaaaggaccgaaggcagtctcataagagagtgattgggcagataatagtgtgctcattgctttttccagaattacaggcattaacatgcccgtcgtcattaaaacgctgacgacaacccggaaagccgagggaagtacgaggttaactcgtatttaactctttagtcgtttccgctcaagcagggttatcgcagcacgaggccggatacgcttgagcaagggcgattaccaaagaagtgtgagtattcaatcaaatcacacaacagcatggggtttcctccttattagtctctggtttaacaatgttttcagtgtatcttggaatgattaacagtcaactttgataaagggataaggtgaacgagatggaaaaaaatacgatttcacaggaccaaatccgtgaccgtttttcgaaagccatgtcacgtatgtatcagcaggaagtgccgcagtacggcacgctgctgcaaattgttaaggacaccaacgcagactatttgcgccagcacccggaaaccttttctcatcaggtgaaggactcggagcttaaccgcctcgacgtagagcggcacggtgcgatacgcctcggcacggccgaagagctcgcgaccatgagggcgctatttgcggtgatgggcatgtcgccggtcggctactatgacctctccgcggccggtgtgccggtgcattccaccgcgtttcgccctatttccgaagccgcgctgcggataaaccctttccgcgtatttacctcgctgctgcgacttgagctgattgataatcctgatttaagagaaaaagcgcggcagattcttgccgcacgcgacatcttctcccccgcgtgcgcgaactgattgcggtgaaccagcagcatggcgggctcactgacgcacaggctgacgaattcgtcgccgaagcgcttaaaaccttccgctggcacagcgacgcgttggtcagtctggatacctacaacgcgctgctcgaacatcatcgccttatcgccgacgtggtgtcatttaagggaccgcatatcaatcacctgacgccaagaacgctggatatcgaccaggtgcagcgcaaaatgcccaaatacggcatctcgccgaaagaggtcatcgaaggaccaccgcgccgcaacgtgccaattttgctgcgccagaccagcttcaaggcgctcagtgagaaaataacctttaccgattcggcagaggggcaacacaccgcccgttttggtgaaatcgagcaacgcggactggcgctcacgccgcagggtcgtgcgctgtacgacaaactgttgctcgaggcctcgggttccgacacctcaaaagacaatgacgctcaccagcgccacttcgaggccgttttctccgccttcccggatgacatcgaatctttacgcaaacaagggttgggttattttagatatgcgctcaaagacggggctactctcgccgccgcacagcgcacgagcgacacactcgacgagctgattaaacagggcaaggtcagcgtcacgccgattgtgtatgaagactttctgccggtcagcgccgcagggattttccagtcgaatctcggcagcgataagggcgcggtaagcagcggaaatccaaaccaagcggcgtttgaacaggcgcttggcgcggcagtcattaacgagttctcgctgtatcaggcgatcgagcaagcttcgttgaatgcgatattcaatccggcatcgtgacggtaaattgtatttagctaataaaagcggaataatgtacggcggccaaaaaaccgtatattcctatttttcaataagttaaataaaaagggttgtcgtgacgcaacaagtagcgctgattacaggagcgagccgaggcattggtcgacaaattgctcaccattttgcccaaaaaggctacagcctgatactgctggcccgtgaccagagcctgctcggccgccttaagcagacgctgccgctccagccagagcaacgggtgaaaacgatagccgtcgatctttgcgatgcgccgtcggttgccagcaaagttcaggacgcactggccgattttgcgcagcttgacctgcttgtgaacgccgccggaattttccgtcccggctcgagcggcgccaccctcggcgatttcgccgccatgctggatgttaacgtcacggccatccaccatctttgccaactgtgcattccggcgctggccctttccgaagtgggccgcatatttagcctctcttcggtgagcggcgttcaggccttcggcgggatcgccggatacgccgccagcaagcacgcactggtcggctacagcctgtctctcagccgcgagctggccgcgcagggcattaaggtgaccgtgctctgtcctgacgtcgtcgataccgagatggcgcaaggctcggggttggaaccgcatcaaatgattgaaacacaagatatttgccgcgctatcgagttcgtgatgtccttatcacctgccgcgatggttgaacaactgaccataggtcgcatgagaagataatggaaatcacgttttatcaagaagttgacagcactaacagcgaggcgaaacgcctggttgacggcggcaaagccctggattcgccgtagttgcaaaacgccagaccgcaggccgtggccgtttcgaccgcgtgtggcaaacgccgaccggcaatctggcgctcacctttgccattcccgccccgccttcacgtcccgacctgcccacgctggcactgatgaccggtctggcgctgcacaacgtgcttcaaccgctgctcggtgaccgtgcgcaggtcaagataaaatggccaaatgatatgctggtcaacggccataaagtttccggtacgctaattgagcgggtcggcaaagtgctctacatcggcgtcggcgtgaatctggtcagccgccctgaaaacgtgccttacgaaaccttttcgctggccgaggtggtcaatattacggtcgaagaactggccgaggcggtaacagcgcactggagcgcaacgctggcgcaatggctggaaaccggctttgctcccctgtgcgacgactataacgcccacctttatgggcgcggagaaagcttgcgtatctcgctcgaccgcgagcgcgccgagtgggccgaaggcacctgtaccggcgtgacgccagaaggccacatctgccttgcagactccgaaggtcatgtcacccgctataacgcgggcgatatcgatattatccgcaccctgcaatcggtttaagccacagcggccctctccctttggcgacgggcgactaatcatgagtaatcggtaaatgttggaattaaaaaaagtttctcacgcatttggcgaacgtcgggtgctggaaaacatcaccctgcagctcgacgaaaagcgcattggcgtggtaggcagcaacggctgcggcaaaagtacctttgcacgcctgctcaacggattactgatcccccagcacggcgatgtcatcgtcgacggactgaatactcgcgacaacggtaaggcggtgcgccgcaaggtggggttcgtgttccagaacccggacaatcaaatcgtgtttcctatcgttgaggaagatctggcgttcggcatgaagaacctcggtctgccgaaagacgtcatccgcgaacgcattgacgcaacgcttgcacgctatgatatggagtctttccgtcagcacccgtcgcacttgctgagcggtggccagaaacagctgatggccatctccggcgtactggtcatgcagcccgactatatcgtgtttgacgagcctaccacgctcctcgacctgcgtaataagaaacgtatcgcgcaggcgattaatgaaatggaccagaaaactgtcgttgtttctcacgacctggaattcctgcaggacttcgaccgggtattggtgtttgaaggcggtcaggtggtaattgacgatattccgagcgtggcgttaccggcctacgtcaggatgatgtcatgacggtcagcgaatatattcacgggcactcttttattcaccgcacgccgcccggactgaaaattttaattttggccgtgctcggcacgctgctgttcgtcttcccgaatatgatttttgctgccgcctcgctggctattatcgtgatgctttatccactggccggtatttccccgaaggtcatgctggcacaaattaagccgatcctgaccattctggtgctgttatttctggtgcagctatttatggttaactggcaatcgggcgtactggtcattgttcgcctgagtgccttgatgctgaccgcctcgttaatcaccttaaccacccgcagctcagacatgatagacgcgctggaaaaacggctggcgtggctttatttcatcggtattaatccggccaaaataagccttgcgctgtcgctcgcgctgcgctttattccggtgttagctgccattactcaggaagtccgcgaggcacaaaaggcgcgcggcctgaataacagcgttattgcggtggctattccggtgattgtccgcaccttgaaaatggcggatagtatcgccatggcgctcgaggcccgcgcctacgacccacagtcaccgtatcgcgccaaaaaatcatccaaaaaagagacctctgatgtcgactaaagatattgtttatattgccctgtttgcggcaattaccgctgcgatgggattatttcctgcttttacgctgcctattattgccgtgccgattaccgcccagtcgatggggccgatgctggcgggcgcaatcgccggtgcaaaacgcggtgcgctggccatggtgctgtttgacctgctggtgatggtcggtctgccactgctggccggtggacgcggcggagtgggaatcttcctcggcccgagcggcggttttattttggcctggccgattgccgcgctgctgattggttatctgtacgagaaaaatatccgttcactgtcggtggttaaagaggcggtgtttattacgctgggcggcattgtgattatttattcagcgggattccatggatctcagccttcgccaaaataagccttagtcaggcggcaatcggcgcaatgggctttatccccggcgatattatcaaggttattctgaccgtgcttatcgtcaggccggtaaggaaggcttatcctacgctggaatctcgctaatattgcgctcgagcgaaactgagcaaataataaaaaagctgcgcagacgctgacgcagctttttttattttcactagccggcgagcgtattacatctcaatcaaaatcttgcctttaagcgtgcccgaaagtgcggcgtctatcgcatcgctaatattgctcaggctaaacgccgtggctatctcagtgtggactacgccgtcgcgaatcagggccatcacctgatcaattttcctctgcaccaccgatttctcctggctgtgcacccactgacgcaggtggaagttcataaagcgaatgtcggggcgtgtacgccagaaggttggcggaaccggcttacccgagagcaggccgtagtgaataaactgcccgcccgcgaccagcgtatcggcaaacatcagggattcatcaccgccgatgcagtcaaaaatcgcctcgacgccgccgctgcgcttgagccgttccagcgcctgcgggaaggcaggatcgctggagttaagcacatactccgtgcggtatcccgcaaaaatatcgagattttccttcttacgcaccaccgcaaccggcgtcagacccctctgattcgccaagcggataagcatcttaccgatagccgaattggcggcgttgataagcacccgctggcccggcttgaagtccagcgcctcggtcagcatcagcagtgccgtcatcggattaacgtagctgttcaccgcctgacgatcgctgacgaaatcgggcagcgtaaagcaccactcgggcttggtatccttgaaggtctgccagttgcccatgctgcctattggcaacacccgctggcccacgggcaggtggcttccttgcggtgcctgctcaatcacgccaaccccttcaaaacccggcacaaaggggaccgaaatgcgtgaacggtaggcaccagaaatagtaataatgtcggaaggattaatggtggcgtagaccattctgacccgagcatcgactgcggcaagcgtcggcagcgccgtgttttcaagctgaaccacgtcgcggattgggccgaactctctgactattgctctggtgaggactttatctttcatgtaacattttcttcagagaaaaccgtttaacgggttgtagttgtaatgaattgttgcgataggtcgtgtaaatgaagagtcataatgaggtagaggcgtttcgcgtgtcaatgcgagatatagatctcaatggtcatgtgcataattcagtctatttagactattttgaagacgccgtggttaatcaattgcgcgccaatgagatgattaattattttcgaccggccacctcgggcgtctcttatcatgtcaagaagtgcgaagcggttttcctttatcctcttacggttgacgacgttattctccctgcggtctatatcgagaagttaggcaatagcagtttaatctttaatatcaaattagaaattaaagataagaatgttatttgtgctgagggcaaactgatctgggtatgtgtcaatattgacgataataaaccgcgcccgattcccgacgacacccgcaagctgttggcgactcaattcacctttatcgagccggagtaagtcatgccggttcacgacaaggtaaaacagcacgccgagcgtatgggcgcgcagacggcggtcaatattgaaggcaagacgctcagctggaaacagctttggctgcgtgcgctaagcttctacgccgccatggtgaagtcgccagcgcgcggaagtgcctttgcgccgggaaaagtcatcgccgttgcgctgggtaatgacctcgaatttgcccccgcgtggcttgccgccaccgctaatacgcacatttgcgcggtgattgacccgcagctgcctctcagccagttggatggcgtcctcgcccgcctcgcgccagacctgctgctggttaaaggcgcgcacgctgccttaatcgaggccgctcagcgcatgaacatcaatgtgttgccggtagagcaagtcgctgacgccgaagccagcgaggccgaggcgcaggcgtttatccgccacgtcgatgccgcaacgccctttctgattaatttcacctctggtaccaccagcacgccgaaggcctttatgcgttctcgtcgttcgtggcgagtgagcttccgtaacggctacgatatttttaatctctcctctgcggcttgcacgctgtttcccggcccgctgtttcatggcatcgggctttactgtctgaacgaggcgctggacgcaggagcgaccttgtattgcatggagaagtgggacgcccatagggcactcgccctgctggttgagcatcagattcaacgcctggtgctggtgccgacgatgctgaccgccttctcgcgtatcgacgcggcagcgctaccgtgcgtcacgcatctgctgagcgcaggtgccaagcttgagttcaatcattaccggcaggcgcgcgccaagtttccaaacgccgggattcaggagtactacggcgcgtcagagttagggtttatcgccgtctcgtcactcaacgatgacaacgttgactcggcgctgcccaccgttggcctgcccttccccgagatcagctggtcaattcgcgatgagcagggccaaccgctcggcaaaaatcaaccgggtattatttacctcgacagcgaacaggcgtgcatggggtatctgtggggcgatgacggcaaagctttcaagcagcagccctttggctcgaccgttcacgacctgggctatattaacgatcaaggtcgactgcacgtcattgggcgcagcggcgacatgattgtcagcggcggcaacaatatctacctttcagaggttgagtcggtgctgaagtctctgccgggatcgtcgaggtggtggtgctggcggttgacgacgcctatctcggtaaaaagatggttgcctttatcgaaactgaaaagatcgatatcgccacgctgccgacgctgtgcctcacgcagttggcgaaatacaaaattcctgcccagttctgcaaggtgagccactggccattaacgcccagcggtaaaattcgacgcagcgtactcgaggaaaggttcattaaccatgaaatcaactgacatttcactcaattatcagcccgccagcgactgcgaaccggttatcgtcgaagcctgccgcacgccgattggcaaagcctacggcatcttcgccacgctgagcatggaaacgctgctggccccgctgttccataagattcttgaccagcagaagatccagcccgccgacgtcgacgaagtcattctcggcaatgcgaccggcggcggcggcaacattgcacgcctcgcggcactgcacgccggactgccggattcggttcccgccgtcacccttgacaggcagtgtggctcgggcttagaagcggtgatccacgcctgccgcctggtgcaggccgggccggggaatgttatctggcgggcggcgttgagagcgtcagcacggcgccatggcgggtagagaaaccgcagactctgaaacaaatgccgcgcttctatgcccgggcacgcttctcgcccgacgaaatcggtgacccggacatggggatcgccgccgaaaacgtggcacagaaatgcggcatcagtcgtcaacggcaggacagctttgccctgcgtagccaccagcgtgcggtatccgccgcgcaaaacggtctgtttgccgatgaaattgttgcggttgaggttggcggagaaacgcggcgagaagacgaatgcccgcgccctaacgcctcgatggccgggttggagaagctgtcgccggtgtttgtggctaatggcagcgtgacggcgggcaactgctgtccgctgaacgacggggcgtcgctgctgctggtcatgagccgtaaaaaggccagagaatggggttatacgcgcgggctgatgtttgtcgatgcgtgtagcgcaggcgtctcgccaaactatctcgggctgggtccggtgccctcaacgcagaaactgctggcgcgccagcctgcactgacgctggacgacgtcagcatcattgaattcaacgaagcctttgcggcgcaggtactggggtcaatcgatgcactcggcattgatgaacagcgcatcaatcttcagggcggtgcgattgcgctcgggcatccctacggcgcatcgggcggggtaatggtaacgcgacttttcagccagctcatccgccagaaaagccacgatgaaacactcgcgcatccacagtttgcgatggccatgctgggcatcgccggtgggctcggactgacggcactgtttaagaccacagtgctttaaacgcccttccagcgcggttcgcgcttttctttaaacgcctgcgtgctttcggcaaagtcttggctttgccgaatctgcgccagctcccgctgaatatgttcctctagcgtggcgggatcgccgtgaaggcggtgttctatcagcgcattacaggcctgcaccgccagcggcgcgttacgggtgacctgcaaagccagctccagcgccgtgtcgatcagcttttctctttctgccagtcgattaatcaacccaagactcaatgcccgcgacgcgtccagcgcgctcccggccagaatcatctctttaacgactgccgccggtagcagggtggcgagttggctaattcctccgccaatcggcaacaggctgtgccgtgtctcgggcagcgccagactgacgtgctgctcggcaaccagtaaatcgcagtgcagcgccaactccagaccgccccgaaggcgtggccgttgagcgcggcaatccacacctttcgtcttggcataaactgcaatgggctgtagccaccgtgggcgttcagcagccccttgccgtcatcgataaacgcctctttcagatctgccccggcacaaaaaattttctcgcccgcccggtcaggatcaccacttggatctcttgcgatttttcgacccgcgcgacaatctgccccagttcatcgaccatctgtgcattataggcgttgtgcgcctcgggacggttaagcgtcaccagcgcaacctgttcactcaactgttggcaggccagagtaataaaagattcgcgctgaaagagagggctagcgtggcgcataaatatcctgagaaaaggtttaaacatggcgtggatgcgctaaatagtacctgcctctcatgcccctgccagccgtaattctgcgcatcagaaacagtaataggtcagcgccagcagaatgagcgccacacccgctcccaccgaccccagcgcctcaagccagcaggcggccgcgaggcgggtctgggcccgtaatgttttgttgagccacggacgtgaactggttttctcgttaatccaaagcgcaatcaacagcacggtcgccacaccgttgctggcataagtcagcggagacgccagcccgttgtgcgcccagcttgcccaggcaaacagcaagccggcaatccccagcgtcgccaataccagcgataacgcccccaacagcgtttctcttaacgtttccgtcgccttccgctcgcggtgcggtgtcatttctctctgtagacgtagcatcatcctgccctgcccctgatttgatttaccgatagcgggataaacaaaattcatcctcgcgtcattgtaaaaccagattacatcgcttagctttgggcaatcaaagtcatagatttcaggcatggatgaaaataactcatcatgaaagataaacgcctgccgccgttgggctcgctcaaggccttcgatgccgtagcgcgtctcggcagcttcaagcgcgccgctgatgagataggcgtaacgcccaccgccatcagccatcagattcgggtgctcgaagagtcgctggagacggcggtgctgttacgcagcgcgcgcgaagtcacgctcacgtctgcgggcacgcgacttcagcaggccacacagcgggcttttgccagcctgcaggatgcagtcaacgacatctaccgtagccagctgccccggcactgacgctgacgaccacctcaaactttctcacgcattggctggtgccgcgcctggcccatttacgcgccagcgttcctgcgctcgacctgcggctgcacaccagcgtcgaactggtcgatttaagcaaaaataccgtcgatgtggcgatccgctacagcatggaggccgacgaccagctggagtcgacgctgctgcatgaagacacctttgtgttggtcgccagcccgtctctgggcatcacgcggctggaacagctcaaccaggtgacgctgtttcacgtcgagaaccggcatattccgctgccgtcgccagactggccgcagtggcgcgaccgctatggcccagcgtctctgaatattgatgcgggacttagctttaccgatgaaacccacgccattcaggccgccatcgccggacagggcgtcgcaatcgtcagcagtctgctggcgaaagatttcattgagaaaaatattctcaccgtgccgttcgaccacgcgctagcgggaggaaaatactatttcgtcactacacgcgagaaagccgctcgagaagacatctgcgcattaaaaggttggatgcaggcgcagttaagcgctgcaaactgatcgcgtcacgccccgttggcggcagcctcaggggttggaaaaagccaggggcacgggcacgtcgcttgttctcctgatgctgcggattcgcgagcggcacgctgtcaacaagcgcctgggtatactcgctctggggccgtaaaaacagatccccgactcgcccctgctccacgatacgacctttcttcaagaccaccgccgagtgacacaggctgcgcaccacggccaagtcgtgactgatgaacagacacgcaaactgatactcctgctgaaggtcgcgcagcaggttaagaatacttttctgaatcgagacatccagcgcggaggttggctcgtcggcaatcagcagctcgggattaagcgcaatcgcccgtgcgatggcaatacgctgacactggccgccagagagctcataagggtatctcgcagaccacgtcgcaggcagcccgacctgatcgatgagagaatttacccgcgcatcaatatcccgtcgagtgagcgccgaatgagtcaataaaggctcggcaatcgactgacccagggtcatacgcggatttaaagagctaaaagggttttggaagatagcgccaattttggctttgatacgctgccgctctgtgcgccctttgccatcgatgggctttcctgccagcgtaattcgccccgcgtccgctggcacaatccctaaaaggctttgccaagggttgtttttccgcaacccgactcgccgagtaacccgagaaactcgcctttagctatctcaaaggaaacgccctcgaccacgcgattttttttaccgaagccggccgcatagctaatgcttaaatcctcaacctgcaggccttgggcaaaagtattctcgttaaaacgggtggcgataacttcatgatcaaccggcgcggggatcgccgccaacagatgacgggtatagctattcccaggagcggaaaatagcgtctgcgccggactctgttcaacaattttcccctgccgcatcacaatgactcgctgcgcgatatcggcgacgacgcccatatcgtgcgttatcagtaaaatcgccattctatattgctgattgagcctgaataataaatccagtatctcctgctgggtcgtgacatccagcgcggtggtcggttcgtcggcgatcaacagcgttggacgaccggccagcgccatcgcaatcatgatgcgctgtatctgtccgccggaaaactgatgcggaaaacggcttaaccctttctccgcctcggggatcccaacctgcgaaagcagctcgatcgcgcgcgcttttcgctgccgcgcgttgaggcaaggttcacccagcacaatggactcgtcgagctgcctgccgatagaaaataccggatccagcgcggacgtcgggtcctgaaagatcatcgccacttcccgcccacggagggccgaaagttgccaacgaggcaacttcagcagatctttgctctgaaacactatcctgcccgacagctcagcgttggccggcagcaggccaggaatggcctgcgcaatcgccgatttccccgcacctgattcgccgataatcgcggcaatttctccctgatataggcaaaaggtcacctctttgaccgccgccacgtcaccgtcgtggccgcgatactttacggacaaattctcgatgctcagcagcggaagactatcggtcattatcgacgagcccctgcttgagccactggtcaaaacgcggcaccgtcagcgcataaaccttgaaggcccgtttgagattttccaacgaaacaaactcgtccggaccgtgcggtgaaccgtgcccgtcagggataaagtcagggcgcgtcgtcacgctttctcccctaaaggtcagcgcaggattacgcccaaaaccaggtccaaaggtaatcgagttcggcagcacgcgggcgtgggtcgctccgcccatggtaaacggctgggttttcgtttctgcaatttcatcaaaggtggtctgtagccgtttgaccagcgggctgtttttatcaatatgcgtcggtgcatcatcacgcaggacggtcaatttaccgttcaacgggtcaatggcgcgatgcaatgccgtaaacagctccgttttgtcggtcgagagcgggtaacgaatgtccagatagaggtcaacgccctgtccgcttggaatagccagtccgccgttcaaggtcagtttaccggtttccgcgtcctcgaaggcgatgcctgcgctcttgccccacgggtcggccagcagttggctaatcgcctgtgcggcgcgaaaatccgcatcagacaacagttcgctggccaccagcgcatcaagcaaaatcgggatggcgttctgcgtgttctccgggaaagcggcgtggcccgacttgccgtgggacaccagcagcacctctccggcatcttcagtaaccgtaatattgtcgatcagtgaagcgcttatctgaccgagggcctgagtgacctcggccagttttcggcccttcaggcgcagcgtcgcgcttgatggcacggcgttttccgctacccccgccgtcagctggctcaacagcggtccggtaggaacgtgtagaatcagattcaggccgcctttctgcgcatagttaaccggaaaaccgccatctgtgatgatggaatagcgcggtactggcccgtttttagcgaaatatttaaggtcattcataccgatttcttcggcaccgccatagatgatgcgcagcttgtgatgcagtgaaacgtccaggtcgcggaacgcgcgcagcaggtaaaggtcgagcaaagcgggacctttgttgtcagaagagccacggccaatcacgaatccgtcccgttcgaaaggctcaaacggcgggaaggaccagtggtcacccgcaggcaccacgtccagatgcgagacaagccccagttcctgtgcgttttcgcggtcgtcagacagcaccgaaatagcatgaccttcatggctttcagtcttaaaacccagggcttttgcccgcgccttgacgtgttcaaaaacgcggtcaacctcattgccaaaaggcttgccgtcctgcgccaatttttcatcggcaatgcttgggaaagaaacccattcaagcaggtcctggataaattcgtttcgatgctcgtcaaaccagcggtcaattttttctaaaaactgcgcttcttctgcggaaaccttgccggtaaagctattttcttcaataggctgcgtcatgcgatactcctttagaaatagcgttagctagtgggtataaatatctttcacgggtattgccggtcgggatttaatactctcgatagcccctcaccgataaagttaatggccagcaccatcagaacaatcgtgagaccgggcgggatccacagccaccactcatagtcgatcactcggatgctctgcgcggcagcgagcatatttccccaggacggctgcggctgtttcacgccgaggccgataaaactcagcgccgcctcggaaagaatcgcgttggcgaccgcgagcgttaaattcacaatcagtggcgcataggcgtttctcagcagatgcctgaaaacgatagtgattccgccgactcccatcgccctggcggcctgcacataaccactttcgcgcagtgaaagcagctcggcacgcactagacgggcgatgccggtccagtgcagcacgccgataatcaggataacgttccaggaactcgccccaagaatggcggccaaggtgattgccaacgcgtagaacggaaaacacatgatgatatcggtgacgcgcatgacgagtgtgtcggcgaggccccgtttgtacccggcaatacagccgagtgagacgccaatcaccgcctgaaagaacaccgccgccagtgcgaccaaaattgagactcgaccgccgtaaagcaggcgggaaaatacgtcgcggccaatttcatcggtacctaacagatggtcggcatccggcggagcctcgatggcgtaaaggtccatatcatcgggactgtgcgccgtcagccaagggccaacagcgccaacgccgtgagcgccagcagaaggataagcccgaccagaaaatagcggtcggcaagcagcggactgaaaataatgcgccgcgcgcggccgaaaggtttgagttccagcatcatggtgtcagcctcacgcgcgggtcgaccacggcataaagaatatcggccacaatattgataatcagcgtaatcaccgcaagaaacaacacgatgcccatcagtaacggataatcgcgtgactgaatagcgtcaaagctcaaacgccctattcctggccagttgaagataatttcggtcaacagcgtggcagagagcagcgccgggatctccatgccaatcaccgtaatcagcggttttgaggcattctttaacaggtgcggataaatcaccgcacgccttttcaggcccttggcaaacagcgccttaataaaattctgattaatcagatggctgatatcggaacgcaaatagcggctgaaaatcgcgatattgccgatagccagcgtgacggccgggagaaagaggtgtcgtgcgacatcatagagatacgctgcgccgtggtcatgggtgcccagcgttgaaaccccggaaaccgggaaccagcgcaggttgatggcgaatattttcaccagcagtatcgcaataaaaaacaccgggatagatatcgccacgaacgagaacagcgaggccataatatccggcaaacttccgcgacgaaggccgagaaaaattcccgcaggcagcgcaatcagcagcgtaataagcagcgaacttcccgccagcaagagcgtattaacgatgcgttcatcgattaacgtcaacaccggagcaccgctctgcaacgaatagccaaaatcaccaaacaccgcgcgtgaagcccagcgcagatactgtaaccacagcgggtcaagataacccgcctgcctcagcatctcctgcttttgctccggggtggtctctggggaaatcataccgaccagcggatcaccgggctggagttttatcagaaaaaacaccaccagcgagatgccaatcagtaccggtatcgatatcacaacgcggcgcaaaatatagctgaacattatcaatcctgattcacgtcaatggccaatggccgttactgttgcacagtccagttagccacatcggcaaagggctcataagggtaagagtggtagctgaccacccgtttactcagcgcatagccctgattcggaatatagagccagacgtgggaacctgctgattgaccaccttcaaccaaccgccaatgtttgccctgagccggtcagggtcgatagtcgagttaaactgcgccgcataattatctacttccggtgaggtgaatctctcccaccagaaatcattatcgtactgacccggccggaaggttcccccatcagcacaccgtcatagactttgcttttatcctgtagaattgacagcgtggcgttaaaatcggcgacgctcagcaccacgttgatgcctattttcttcaggttctgctggataataggcgcggtaagctcacgcgttcggttgccggtcgggtaattaagagtcagggtgaattcctgaccgtttttctcgacaaacccatcgccattggaatcgacccatcctgcttcttttagcagtgccctggctttctcggggttataagcataagtattgagatcttttggataataagggctctgcggactgtctttgctattaaagactacgccgtgcccgaacagcaatttatcgacaatcgcctgcctatcgatgccgtataccagagcctctctgacgcgggtatcggcaagattgggatttcgcgtatccagagacaaatactgtgctcccacgccgggttgctcgataattcttattccggcatttttataggtctgcaaatcacggttattccatgaagacagttcagcaatatcgacatcgccgttgataagctcgttctgtaccgtctgggcattggagattttaaacagcaaggtttgggtttttggctcgccgccgaaatagtcgttgtttcgctctagcttgacgtactggtctggcagaaactcgacaaacttgtaaggccccgttccgacgggatgcctcagcagaccggtggctttattccagtctttaaccggcacctggctccagatgtgtttggcaagcaccggcttgtcggcaaagtgcgagaaagcggcggcataaggcgcggtaaaggtaaaactaatggtttgaggatcaatcaccttgataccttcgagcgtcgccgttttaccgacgtggtacgcgtcgtagccaaccaggtgtttgacgaagtccggcgtatcgcgcgggaacccgccgtcggcctcggttgcgtaggtgaagtagacatcctcggcggtgaagggttgtccgtcatgccatttcacgccggcacgaaggtgaagcgtcagcgtttttccctgattggaataatcatatttgtcagccagagacggcttagggttctgatgttcatccaggataaacaggcggctaaagacggcagaaataacggcgcggtcataatcactgaaatacagggtaggatgaaaggttccgctaggattactccagatggcataacgaataatactgtgaggattattattttctgccgccgccgcgttaaataccgtcgcagcggataacgctaacgttattgcttttaagaagaccttcatcactcccccagattatgctttgcgtcccgcaatagaaagaatttttggaaatagaagaccgtcgctcttatttttaatttgagcgagatgtctaaatatgacgaatagcgacaacttattaatttaaaaagtaaattaatagcatatgacagggcatgcaaatactttaaatggtaatgcttatcacattatcgtgtgactcccttcgcgcgggcaaagcgtaacaatctcactgtgctgcccaattaaagcctatctgtgtcttaattctggcccttttcatcacgtaggatagattcaggattcgataaccaaagagataaagatgactgaattttccacattttttgccggtttactggtttatctggtcggtacggcctcacccggtcctgccaacctgtctatcgccaatgcggcgatgaattacggcagaaaagccggtctggtgctggcctcagggtcatttctggctcactgtgctggggagtgatgaccggtatcggggtgtcggccctgctggcctctcatccggcctttatcttctggctcaaaatcgccggtgccgtttatctcttgtggctgggtataaggcgctgcggcgcgccctttctaacacgccaccgtctgcgaagaaggtcggcgaggcacccgccaactcattgggattctacctgcaaggattaggcattcacctcaccaaccccaaggcggtgctaacctggtttaccgtcaccagcgtcggtctgagcgcctcgtccctaaaggcggcgtgttcctgctggtcggcagctgtgcgctgatgggcatggctatcttttgcctctacgccgtggctttttcggcgcgctccgccgaggcctttttcctgcgcacccgccgagggttcgatctgctgtgcgtctttttctatctgctgtttgcgctaggatttatcgtttcactgcgctagaacgcgtcagcaaaaatactccggtcaggatttgccacagggtgatggggtaaaccgaggcacgttcgataatgccgattgggaagagtgcggcggtgatagccgccatacaggccagtcccagacagcctaaagacaaactcagccaggcgtaagcggtgaatcctggacgggcgtgcatcatccagccgacggtaatcaggcacagattaccgcccgctatcgccagcaccgcccctatctcatgcggcgttacgcctttgcccgccgagccgctgtggaacagggcaatcatcacgccgcctgcgccgtgaagcaatccacagagcagaaacagccatcgtcctgagccattaaacaggggaaacagtaggcagcaggcaataaaaaacagccccccctcaagggcaaagccgccgttcattatgctatgcagcggagaacgcagcggaataccgaggtcactgatgtaattctgactgtaggaataggccggagaatgccagcctgccgcactgacccactccgccagcagatactgcacgccgccgaggctaaaacacagcgcgcccactctttgttgaatctgagacatctgcatattcatcctgttaaaaaggcttaggccgcattcttgaccggtggcgcgtcgctctcaagacgctgacgacgtctcaggttggggaaccatttcatccacagcgcgaccaccaccaacgtacctacgccgcccagcgccgccgccggaaccgcacccagccacgcggccaacatgccggactcaaactcaccgagctggtttgaggtattgataaatatagagttcaccgcgctaacgcggccacgcatatcgtccggggtttcgagctgcaccagcgaaccgcgaattaccatgctgaccatatcaaaaccgccgagggcaaacagcgccagcatggacagccagagtgtcgttgaaagcgcaaaaacaatcgtcgcgatgccaaaacccgcaacggcggcaaacatagtcatccccacgttgcggctcagcgcacggcggctgagccagaaaccgaccagcaatgccccgaccgcaggcgcaccgcgcagcaggccaagccccatggaccggtgtgcaaaatgtcatgggcaaagataggcagcaaggcggtcgcgccgccgaggagcacggcaaacaggtctagcgagataacgcccagcacgtcagggcgattgcggataaaactgatcccggcaaacagcgtcttgaaagtggccgggacgcggcgaggcggtgcctgctcgtagcgcaaacggctgaccatcagcgcggagagcagatagagcgccgtacagacaccatagaccacgtcggcgccggcgatatacagcagcccccgagcgcaggcccgaccatcgccgaggcctgcccgcaacgctgttggccgccatcgcgcgcggtagcacggccggtggcaccagcgcaggcagcatcgacagctgcgacggcccctccatcgccttggccgtcgaggcgacaaacagcagaccgagcacgataaactcgttgatgtgatgggtgaacgtcatcgcggccaacgccgcaattgccagcgcctcaaccagctgcgccagcaccacgatacggcggcggtcgaactgatcggcaagatgaccggcgaccagcgccagtgaaaccgacggcagaaactgcaccagaccaatcagaccaaggtccaaggcacggccggtaatcgaataaatctgccagctgaccacaatggtcagcatctgaaaaccaaagctggaggaggcgcgagctatccagaaagcgacaaaagaacggtgttgcaacagcgagtccgagtgaacggaaggaggaggcatgatggttccctgaaaaaaaatcgttcaacgtaataatagttattcaactatacaaaaaagtatttttaccatagataattaacaaaactaaaagatataacctccgctgcataaaaaaaccgcttaagaataaataagcggtttgcacttcgcggcgtgagattacgccaccgcccttccccgacccgggatgtggctcaacaattggcgggtatagtcgcttcgcgggctgtcaaaaacctgctccgccgtcgcctgctcaaccaccttgccatgctgcatcaccaccacatagtcggaaatctgccttaccaccgcgaggtcgtgggagataaacagatagctcagcccgagttcgcgctgtagcttgtcgagcaaagtcaaaatctgcgactgtacggcggcatcaagcgccgataccggctcgtcgaggaccaccagttcgggtgaaatggccagcgcacgggcaatcgccacccgctgacgctgcccccggaaagcgcagaaggccgcacatcgagcaggcgacgcggcaactctacgctgtccatcagccactcggcccgctcgcgacgagttttgcggtcaccgatacgaaaggcttccagcggctcggtaatgatctccagcagcgacattttcgggtctagcgaggcgtaagggttctgatacaccacctgcacccggcggcgaaacgcctgtcggtcggcacggttcggtgcgctaaagtctttgccgtcaaactcaattcgtccttcgtcctgcgcctctagcccaagcagcatgcgcacggtggtcgatttacccgagccggactcgccaaccaggctggtcgtgccgccgcgcaccaccggaaacgatacccgatcgacggcggtaaaggttccaccgccgccggaagcgaagcgcttaactaatccctcggcgcgcagcagcacgtcgctgtgctgcacgccaagccgacgcggcacctcaaaaaaggccggtgaagcatgcaacagctggcgtgtataggcgtgtttgggctgattaaacagcgcagcggccgggccgctttctaccaccttgccctgctgcatcaccagcacccgatcggcgcgttcgagcgcgacctgcaggtcatgggttatcagcagcagcgcgatgcccttgctgcgcacgatgctctcgagggcgtccagcacctgtttctgcacgctgacgtccagcgcgctggttggctcgtcggcaataatcagtttgggatgatgactcatcgccatcgccagcagcacgcgttgacgcatgccgcctgaaagctgatgcggataactgtgcagcacccgctgtgggtcatgcagcccgacttcggccagcagaccttcgacccttaccgccgcctgcttcttgctcacgccgtgcagcgtcaatgcctcgagcatctgcttccctatggtctgaatcgggttgagcgactgcccgggatcctgcggtacgaagccgatatccagccctcgcagctgctgccagcgccgctgacccgcattttccagcgactcaccgtcaagagataaggtccccgagagccgctgcgcctgtctgcccagcagccccaccagcgcggaggcggtggttgacttacctgagccggaaccaccgacaatcgccagcacctcgccgggcgcgagctgtaaacccaactcgtctaccgcgcgcagcgtctggccatctttcaaccggtagtcaatgctcagtctttcgaccgacagtaaaaccggcttagcctgaatttctggagtctgactcattgttcctccgccctgtcttgaatgaaaccggcaacgcgattggtggccagtacggcgaacacaatcatcagcccgggagcgtggtgtaccaccaggcggcggcgatatagttacgcccctcagacaccagcagcccccactccggctgcggcggcggagcgccaaagccgagaaagctcagcgccgataccgacagcagcgcaaagccaaactcgagcgccgccagcgacagcaccggagcgagcgcgtgcggcaggatgtggcgtcgaataatcgtcagatgactcacgccccggcgcgggccgcttcaacgaacagattaaccttgctgcgcaatacttcaccgcgcgacagccgggcgaaggtggcgatagacgacagcccgacggcaattgcgatatgcagcgtgccaaagcccaacaccgtcacaatggccatcgccagcagcaggttggggatcgccatcagcacgtcgatgatacgcataaacaggtgatcggtttgtcccccgatataaccggcaatcaccccgacgctcgccccacaaccagcgcaatcgccaccgaaaacagcgtcgccttgagggtaagcgcggtaccaaacaccgtgcggctgtagatatcacgcccgaggtgatcggtgccgaaccagtgcgcaagcgacggcggctgcaaggctaccagcgggttgccgaccaacggatcctgatgcgcaaaaatagcgggaaccacgccccacagcgcaatcagcagcagcaccaccaggctgagccacagcgtaaaagcaaagcgtggacgcgaggccagacggcgctcgccgggcagaattaagctcatttgcccctcccgccgagccgctgtcaatgcgcgggtcaagcaacggatacagcaggtccaccacgaagttgaccagcacgaagaccgtcgcggcggttaacaccacccctgcaccaccggaatatcctgcgtggagaccgcgccctgcgccagcctgccgaggccctcgcgcgagaaaatggtttcggtcaccaccgcccggccagcaagtgtccaaagatcatgccggtcagcgtcaacagcgggaccgccgcattgggcagcacgtgtcgccacagcagatgtgcggtgctggcccccttgagacgaagcgcatcgataaacggccgacgccacacttcggcaagcgaccggctcattacctgcgccagcgtggccgccgtaggtaccgccagcgtcaaggtcggcagcaccaacgactgccagccatggttgcccatcgcaggaaaccacggtcgggtgaacgagaacgcctgtagcaacagcaggccaagccagaacgtcggcagcgccgcgccgagcgagggtaaggtcagtaacgccgactttatgcgccccgcaggcaatacgctcaccccggcggccagcccccgccgataacgatggcaaccgccaacgcacagacggccagcagcaacgtcggcggtagcgcctgcatcaccagacgcgtcaccggatcgccactgacaatagaatgcccaagattgaggtgcagcaggtcccaaatcgcccaggcgtactgcacataaaacggctggtcgaggtggtattgcgccttgagcgcattgacctgcgcgatgtccaccgtgctctgttcaccctgattgagcatgatggtcaccgggtccgacggcagaatatagaggatcaggaaggtgagcgtgtaggccgcccacaggacggcaacactcatcaacacccgcttcaccagccgagggaggcgaagagaggggcgattaatcttgtcaattgggttgtccgaaacccaggttttgtctgtcatgcgcccctcttctctgggttattgctttggcgaaagccaggtgtcataaagctggaagcgcgacgacgcatcgtagcggaagccgtgcacgttattgccggtagcaatcaccgtcgccagctcgaccagtggaatcgcgtcgccgtcggcaatcagccccttcgccgcgtcggtcaccagttgctgacgcttttcggtgtccagggtctggctcgactgctgaagcgcggtgtcaatctggttcgccccgcgcttgttcacgttgcgtcccccggaccggcatcgaacaccgtacgcagaacgtccgggtcagaacgggtcaggttatagaactcagcctcctgtgcgccgctggactgacgggcgatcacttgccctatcggcgccttgtcaagctgcatatcgattcctacctgctttagctgctgctgaaccaactcgataaacggcgcagactgccagtaggtcagcgtaaagctcagacgcttgccgtccttcacgcgcacaccgtccgcccccactttccagccgtcgttgtctaacagactcttggccgcctgcgggtcatacttgagctggctcgagaggttctgatacagcggcgtcgttttcgccagcaccgagctggccggtgcctgatagcgcgaaagaatcggttgcagcgccgcgcggtcaatcgccagattcagcgcctgacgcacgttaatgtccgccatcaggggtttcgactgattcgggaacaggctgtagaccagccccgggttagtgcgggcaataatcggtaatttcttggccagaatcagcggttcgtcctgcggcgtcacgcctgcattgaggtcgagctgtcccgaaaccaggctgccaaaacgcacgccggattcggggataacgcgatactcgatgccgtcgagatagctgtcaccctgatgcttcgctagcgacgacggccatttgtagccgctacgacgggtgatatcgaccttctgattgtgcacaaaggtcgaaagcacgaacggcccagtgccgataagaccgccctgacagcgcgcgtccaccgtggctttcaccgtctgggaagcgaagaacccgaggctcatggtcgaggtcgcctgtaggaattgggcgttcggctgcgcaaacacgacagtgacgtgattggcgtccggggtatcgatttcggtgaggcccttcagataggtcgaggccagcgaggcgcgggcacccatggccacgatcgcttgaagattatccttgaccgactgggcgttaaaggcggtaccgtcgctgaaggtcaccccgtcacgcagggtaaaactgaagcggcggttgtcgtcgctgaccttccagtcggttgccagccacggcacaatcttgccggtggcggggtcctgatcggtcagtgaatcggttaactgacggccaatattgagcgaattgttgttgccgacctgctgcggatcgaggcagttggggtcggtgtcgatagccacgaccagcgtaccgccgctgtgaggcgtatcggcggcagctttatggtcggcggtcgcggcctgcggtttgtcacaggcagaaagcgcggtggcgatcatcagaggaaaaacaagccggcgcagtcgcgcgccggtggtagcgttccccgttacagcggtattgaaagcaaagcgttcctgcacgtccctatccttttttaattatttagccgcgacgtcttcagactgatacgccctgcttttgttggcataacggttggtcttgaaggggatatccaaacgttcacgcagcgtcttcgcctcggtcgacggatgccagtagccgcgttcagccagaatcggcagtaccagacgcgtgacgtcatcaagcgcctcggtcagcaccggcccgctgatgataaagcccgttgcgccgccctcttcgacccagcgaataaaggtgtcagccacctgctcaggcgtaccgaagaattcgcccttcggcagcgtggtgcggaacgcgatgtcacgcagcgtcaggttctcttctttagccaggcgctttatctgatcggttgtcgaacggaaggtgttctgtcctaaatcgccgacgtctgggaaaggaccgtccagcggatactgcgagaagtcgtggtggtcaaagaaacgtcccagataggccagcgcgtcgtcgaccgacagcagtgacagcagatactggtatttggcttcggcctcttcctcggtacggccaacgatagggctgatgcctgggaaaatgcccaccggatgacgatgatttttagccacttcctgctgtagtttagtgctgtactcctgcgcctcttccaatgtgcgcgcgttggtgaacaccgcatccgcagatttacccgccagcgcaatcccggtgtccgaagcacccgcctggaagataaccggctgtccctgcggagagcgctgaatgttcagcgggccagcgaccgagaagaaacgtccttcgtggttcagtttgtgcagcttggaggcatcgaagaacacgccgctttcgcgatcgcgagtgaaagcatcgtcttcccacgagtcccacagcccctgcaccacgttgatatattcctcggcaatctggtaacgcagcgagtgctcgggatggtccttgccaaagttcttggcagaccctgccagcggcgaggtgaccacgttccaacccgcgcgtccctgactgatgttgtcgatagaggccagctggcgcgccacggtgaaggggtcgctgtatgaggtagaaatggtgcccgccagaccgatattctgggtcaccgacgccagcgccgacagcagcgcaataggttcgaaacggttgaggaagtgcggcagcgatttttcattgatatgcaaaccgtcggcgacaaaaaggaagtcgaaattcgctgcctcggcgcgcagcgccagctctctaaagtaggggaaattaacgctggcgtcggcgggtgccttctcatgacgccatgaattcatatgcccaccggcaccgtgcaacatcaggcctaatttaatacttttctttgattggctcatgggaagcatcctttattacagagaggttttatttgatatttccataaaacccggatcccgctaaatacaaaaacgtcccattaattgccactatttagctatagataatatcggccattttccctggttgtctttaatccctccgcatttccactttatcaatttggatagtcatttttgttgttttacttcgggttaagcctcgggaatagtgaaaatcaacagctcaacgagttaaaaacacaggataaataataacaatgatgcacagagccaaattaaccgtcgtcgccgccttattaggtatttcatcgctgacccacgctgccaataccggtattgatctcgttgccaacgagaagccaatagacacgcctaaaagcgccgaagcggcagccaaaataccggcaaattttaaattcgtgacgcccggtacgttaacggtcgcgatcgccgtattaggcagctccccgccgtttggtacttacgccagagacaacaaaacgattatcggcagcgaagcggatatcgcccgcctggttgccgacggcctgggcctgaagcttaagctggtgccttctgcatgggaagactggccgttgggcgtgacctccggtaaatacgacgccgcaatcttcaacataaccgtcaccaaagagcgtaaggaaaagttcgacttcgccacttatcgtcaggacacgctgggcttctacgtgaaatccaccagcagcatcacctcgataaaatctgcgcctgatatcgccggtaaacgcattattgtcggctcgggcaccaatcaggaagcggtgctgctggcctgggacaaagagaatcaggctaaagggctcaagccgtttacgccgatttacgtgaccgacaacgccgcgtcttcgctggcgcttcagtcaggccgtgccgacgccacctttggacctaacgtctccgccgcctaccagtcaaggctgacgggcaacaccaagctggttggcatcgtgccgggcggttggccgaaaacggccaatatcgcggtcaccatcaaaaaaggtaacggactggtcaacgcggtgcaggcttctctgaacagcgcgattgccagcggcgcctacatcaaggtgctcgaccgttgggccgaagcctctgagaaaatcgatcactcagagattaatccgccgggcctcggcgactgattgaggacatgacctatgagccaggacaagtttattcatactcaagccgacaacccgctgatcgtgccgattatcgagggtctgtttggtgaataccgcgcacgctacggtgacttttttagcaacaatcaggaagtggatccaccgagcctgtatgccgcgccggacggcgtttttattgtgctactgcgcgatgagcgaccgattgcgatgggtgcctacaaacgttatgacgagaacaccgccgagctgaagcgcatctggaccgactcggcgctgcgccgtcaggggctggcgcagaaggtggtgcaagagctggagcgtctggcgctgaatcagggctatacgcgggtgtttctgaccaccggtttccgtcagccggaagcggtaaaactctatctgtctcaaggttatgatccacagtttgatattacgttggaccgtgaaatattttctaaaccgccctacgacggccgtctgcgtttcctgaagtcgctaacgccgaccgctgccgtaaaagagaccacgctggtcaaagatttgaaggaaaaggcctatgactgattcaagcccgcgccctactccttctgctccgcttaaggttgttccggctcgttacccctgcgccttctcggcgcagttttcgccctgtttatcctgttagccatcgtacagtcggttgccaccaaccctcgctgggaatgggcggtattccgtcagtggttcttcaacccggttatccttgaaggtctcggcagaacgctgctgctgacgctgctcggcaccgtatttggtatcatttttggcacccttttagcccttgcgcgtttatcaaaatcctatttattgaactcactggcctgggcatacatctggctgttccgctccctgccgctgctgctggtgctgattgttctctataacttctcttacctgtacgacaacctgtcgttgggtattccgtttacctcgattgagttctttaaacacccgaccgttgacctgctggaccagttcaccgtcgcggtgattggcctctccgccgtgcagtcagcctataccgccgagattattcgcggggcatcgtcggcgtcgagcaaggccaacatgaagccgccgccgcgctgggcctgccggggtatcgtcgcaccttccgcatcattctgccgcaggcgctgcgggcgattatccccaccggtttcaatgaagtgatcggtctcgcgaaaggcacgtccatcgtgtatgtactggcgatgcctgacctgttctataccgtacaagttctgtataaccgctcgcagcaggttatcccgatgctgatggtcgccaccgtctggtatctggtcatcactaccgttctgtctgtgctgcagtattacgtcgagcgttatttctctcgcggtgcaacgcgtcaggttgcgccaaccccgctacagcgtctgcgcctgtggcgtaccgcaaagccttaactggagcgatgaactatgtcagaagcttttgatctctacgtgacgcgccccgggcaggcggcgccggaagcggtggccccccgcgtacacgcacccagaccgcaggccgaattgaaatcagcaatctcagcaaatcgtttgggctgcacaaggcgctgaacgacgtcagcctgacgattgagcccggcacggtgacggtgatcctcggcccttccggctcgggaaaatcgaccctgctgcgcaccatcaaccatcttgaacgggttgatgaaggctttattcagatagacggcgattacgtcggctatcgtcgtaaaggtgacaagctgtacgagctgaaggaaaaagctatcctcaagcagcgtatccactgcggctatgttttccagaactttaacctgttcccgcacatgaccgtgctggacaacatcattgaagcaccgattgtccacgggctgctaaaccgtaaacaggccatagagcgcgcctatgagctgctggataccgtgggtctgcgcgaaaaagctaacgcctggccgcgccacctttccggtgggcagcagcagcgtatcgccatcgcgcgtgcactggcgctcaacccgaaggtgatgctgtttgatgaacccacctcggcgctggatccggagctggtcggtgaagtcttggacgtgattaaaaagttggccgaatctggcgttaccctggtggtggtcactcatgagattggcttcgcgcgtcaggttgccgaccgagtggtattcatggtggacggtgcggtggttgaaaccggcagcgcgtctcaggtgttggacaacccgcgtcatcagcgtacccgccgcttcctcgaaaaagtgctataaaccgccgaaataaagggcgatccaggcaaggctcgataatcgttgaagcctgccctggacgccctgctaataagacagtgccgctgacgccgccccgctatccgcctctgcagatgaacatccaacgcgcccaacggcaccaccgcatcataataaatcatgccgcccttctcgattgaaaagtacacactcggttacacaggtaaactgtacagctaaactgcgcagttctacactttcatcatgttagttactctgcttagagatcctacgatgaatgagtccctgccctcaacgcgctggccgccgaactgcgtatttctgccggaaaactggtccgcagaatgcgtgaacagtcgcgccccggtgatttcaccacctcgcaaaagtcggtgctgttgcgtatcgacagagacggcccagcgacggtgtcggcgctggcccgtgcagaaagcgtgcgcccgcagtcaatgcgcatgacggtggcggcattgcagacgttgggcgcactgagcggcagccccgaccccaccgatggacgccagaccctggtttcgctgacccccgcttttcgtaagaagcttaacgccagccgcgccgcaaaggaggactggctggtacaggcactgcaacaccagcttacggccagcgaacagcaacagctggccgctacgttacaactgatacaacgacttgctgactactgagtcattaccttcttagagcgctaaaatatgaccaccactacaaaaggcgttttccgatccctacggatcttcaactaccgcgtctgggccgctggcgcgcttatctccaatatcggtacctggatgcagcgcacggcgcaggactggctggtactgacccagctcacccaccacaacgcctcggcggtgggtattgtcatggcgttgcagtttggcccgcagatgctgctgctgccgtggaccggctttgccgccgactatttcaaccaacgcaagatgctgatgtttacgcaggcgacgatgggcgcattggccatcgtactgggtatcatgaccgtcgctggggtggtgcagctgtggcacgtttatgtgttcgcctttctgttcggctgcgtgtcggccttcgatgcgccggtcaggcaaaccttcgtggccgaactggtgggagacgccgacctgtcgaacgcggtggcgctcaactcgacctcattcaacgcggcgcggatggtgggaccggcgattgccggactgactatcgcctcggtcgggaccggttgggcatttatcgttaacggtatcagctttattgcggtgctgacctcgctgtcgctgttccgcctcgatgagctgcaccccaacgcccgcgcggcgcgtaaaaaaggcagcttcctcgaagggtttagctacgtctgggcgcggcccgacctgaaggcatcgatgattatgctgttcctgattggcaccttcggccttaattacccgatatttctttcgaccatggcggtcagcgtgttccataccgacgcacgaggatacggcatgctctcgacctttatggcgattgggactatctcgggtgcgctgctggcggcgggacgggacaaacccaggttcaacttgatgatagtcggtgcttcctttttcggcctcggcggactgcttgccgccttggctccgacctattggctgttcgccgcttcgctcattgtcattggcgtcgcggctctgactttcatgaacaccagcggcagcctgatgcagctctcgaccgaacccgcgatgcgtggccgggtgatggcgctccgcgtgggcgttgcgttgggaggaacgccgattggtgcgccgatcgtcggttgggtcgccgacaacttcgggccgcgctggtcgctgggagtcggcgcagcagcaggctttcttgccgcgctggttgggctttacgccatcatgcagcagaagaaaaatccgcagccgatttaatgattgccccgcagagcaggctctattgcagccacttccttgaccggtgcaggctggctctgaccaccagaatatgaaagggttttatcgcggcgagataggcgtggccgagcaggttgtggcagtgaaccacggttgtcgcaaccagctcatcgccgttgggaccctctcggcgaaatatcgacaggcgaaaatcaagatgatcgtcatcttcgccgaaaataatctcgcgttcggaacggcttaatacccggaagaagtcgattttttcggcctgctgcccgtctatttccgctcgcagcgtgcgcgttgtcttaagaccaaaagaggcggctcccttatcgcgaagggcaagcaatgccttgaaccacggcgcaggatgaccgagcaccgcctgcgccaaggcattgatatcgcgggtatcttcaggcagcagcttgagggtaaaggcatcgaccagattcgcacgctgataatacggcgtcagctggctgtcgacggggggtttagccgattttatacggccttcgcaagacggaaatagcgccatgattctcatccctaaagagtggaagaatttcctgtacagggatgagattagcagctgttaatgcgttgactgcgtttttatcgcatcctttagtgtcaataaatgctactgcgggaaaatgcccttaaagctggttttcttgcgcggttcggtcattagcgacgccagcgcatcgacgcaggcgaggtaatgcggcgttttcttgtgggcgtttaccgcctcaatatcgcgataggcttcgtaaacataaaagcgcgttggcactttttcgtcctgtaatacgtcaaatcgcaaatttcccgcttcctgtaatgcaccaagatggttcaactcgaagacgcgtaaaaactcatcgaccttatcggccttaacgttaatttcaaccagggtcacttccatcatcctctccttttggcaggcctgggtttatcgatacctgaaagagtttagccgctgtatcgcgcgggccgtggacacattaaaggaaatgcaagacacatcacaattagcaaactttgccgctcaaataattgttatcacagcaaaacagcgcccactattagtctaggtttccactcaagagaggatgagtatgaactcacccagcacctcgtcaggcaatgcgtcttatcttatggctctggatgccggcaccggcagcattcgcgcggtcattttttctcttgagggtcagcagatagccgtaggtcaggccgaatggcagcataatccgctggcagacgtgccggggtcgatggagttcgacttgcacaaaaactggcaactcacctgccaatgcattcgacaggcgctggccgccgctaacctgcccgcctcggccatcgccgcagttgccgcctgttcgatgcgcgaaggcattgttctctatgataaatctggggaacccctgtgggcatgcgccaacgtggactcccgcgcgagccgtgaagtcagcgagctgaaagagattcatcacggagagttcgagcgagaggcctatctgcattctggacagacgctggcgctcggcgcgatgccacgtttgctgtggctggcgcatcaccgtccggatatctatcgccgggccgccaccttgaccatgataagcgactggcttgcctatatgctgaccggggaacttgcggttgatccgtctaatgccggcaccaccggtatgctgagtctggaaacccgcaactggcaccccgaactgctcgagcttgcgggtctgcgcgccgatatattatcgccggtgctggaaaccggcacccgactgggcagcgtgaccgccctcagcgcggaacagtgtggactcaaggccggcacgccggtcggcatgggcggcggcgacgtgcagcttggctcgctcgggcttggattggtccacgccggacaaacggcggtactgggcggcagcttctggcagcaggtggtgaacctgccgcgccccgtgaccgacccgcagatgaatatccgcattaatccgcacgtcatccccggtatggcacaggcggagtgcatcagtttctttaccggattaaccatgcgctggttccgcgatgccttctgcagcgaagaaaagctgctggcagagcgcctggggtagatacctatagcctgctcgaagaaatggcggcgcgggtaccggcgggttcctggggcgtaatgcctatcttctccgacgcgatgcatttcaagaactggtaccacgccgcgccgtcgtttatcaacctgtcgatcgatccgcagaagtgcaacaagcagaccttattccgcgcgctggaggagaatgccgcgattgtctcggcctgtaatcttgatcttatcgccgagttttccggagtaaacgcctcgtcgttggtgtttgccggtggtggctcgaagggcaagctgtggagtcagattctgagcgacgtcaccggtaaaccggtcaaagtgccacaggtgaaagaggcgacggcgctgggctgtgcgattgccgcaggcgtagcggcggggctttatcggtcgctggcggaaaccggcgaggcgctcgtgcgctgggagcgggaatatcagcccaacgctgcgcatcatgagggctatatggcgcaaaaaactcactggcaggcagtctatgccgatcagttgacgctggtcgacagcgggctgaccacctcgatgtggaaagcccgggcctgtaaatcagctcaccgccagcagcgggcgcacctcttcgcgttcgcggctttcggccatcagcgagagcagaattttttgtaccgcctgggcaggctgtgacagcggcaaatggtccgaaacacagagtgaaagcggagcctgaatcgacggactgctgatgcaggccatccaggcattggccggtccaacgatagcgcgcgccgcagactccggcaaaatagtggctcccagaccgctggcaatcgcagcggtcagcgtgctggccgactctatttctccgatcactttcgccgctagccttctcagcaccatcgcgtcgtccaccagcttgcgcagcacgtcatgggtgcgcggcaggaacaggttgagcttggcgacgtcggtcaattcgacaaatttacccggattcggcaccgaatgggtggccaccagatataaatcttcttttatcagcggcatataggacagaccgggaatcggcttgttgccgtacagcaccgccatgtccatacggccattgaccgtctggtcgataagctcactgccaaaattctcgtttaaatacagtagaatgccgggatgttgttcgcgcaccgcctgcaacagcggcaacgccagcaacgatgcggcagtgccggggccatgcccaccgagacctgaccattcaacgccatgccagcacagttgactgcgctgtgcgcctgctcacactggcgcaggatagtttgcgcgtgagcataaagaatgttgcccgcctcggtcggcgttaccccacgcttggtacgaaccagaagctgctgcttcagttcaccttcaagcgtagccagctgttggctcagggccggttgagcgatatgcagcacatctgcagcctgcgtgagactgccgatatcgacgattttcacgaagtactttaagcgtctgagattcatctctgtctccatcgagcctggtggttgcattaagggtaaaaagggtcgcccctggctgaagcaaaatgtatttatcataatttccgtgaatactttatccgccggaacctgctaagtgataaagcaagatcaaggccaatcaggcagttatagaaaatacccagggaaataatccgtctaatggcctataaaataagaaaaaatgcgcaggattttgacagagggataaataaagagaaaagaattgcagattaactcacccacggtgttgcaccatcataatgcaagcttatggtttacgaaaaagcccgtcacgctgtgacaggcttaatggacaacattacacggaagggatcatgccgccgtcaacgcggataacggagccggtcatatacgaagcctgacggctggcaagaaatgcggcgactgcgccatactcttccggctcgccgtaacgcccgacggggatggttgaggcactcttgctcgccacctcttcgaccgaaataccctcgcgtcccgctcgtgcttcgtcgagctgacccagtcgtttagtcgcaatgcgtcccggcaaaatcacattaacggtgatgccttcactggccacttcgctggccagcgtcttggaccagccaaccagcgccatacgcagcgtgttcgacatacccaggttcgggatcggcgtgacaatgcccgacgaggtgctggtaatgatgcgaccccagccgaggctgcgcatatccggcaacactttgtcggtcagttgaatcagcgagctgaccatggtggagaactgcgtggcccacaattccggtgcgacgccgctcgccttggtcggcggcgggccaccggagttgttgaccaaaatgccgattgggccaagatattggtgaatgcctgccaacacctggtcaaacttttccggctgagttaaatccatgacgaacgcctttgcgcgtcccctgcggctttaatcatctcggcggtttcaatcagtgccgcttccgtacgcccgcataccgccacggcggccccttcggccccagcgaaagcgccatcgcacgccccaatcctcccccggcaccgctcaccagcgccacgcggcctgtaattccaaaatccatcacaatcctctttcgttagatttactgactttgttcaagaccatttgatacgcagattgcaggtgctgacgcatcatctcggcggcttcacttaaccgctcctcgagcacggcgtcgataatagcgacgtgctcctgacaccactcgcgaacgcgctgcttgttggtatagctgccaaattccagcaaacggcgcaggcgattttgttgctggatagcctgcaggacaaagatattgccgctgaactcggccagcatttcgtgaaaagtggcgtcggtttcaaatatctgccgactgtccacgttgagaatatccggatgatttatcagataaatatgctgaaggcgcaggcgcttaagtgcgcttttatcggcgcgaaaaccgggagaaaccaaaccacccggctcaatcatcaggcgaaatccgtaaccgttactcagcgcgacgtcgctgttcaaggtcggcagaaacgaccagccgtggcccttgttacgcgcgatcaaaccgtcttcagcaaggcgcaacaaagtgcgcgacatcacgccacgatcggcgtcatagcgctgggcaatttcaatttgggtcaatgaatcaggcagttttccggcgatgcggtcttttaccagctgctcgtacagctcctgatcgctgctggtcgggacatcgatgctgatgcgctgtagctcgtcataggctttgagcagaaaaaaaccctgattgcggcgggcctcgatgatgcctaactcgctcagaagcttgagcgcagcacgcaccggcgtgcgggaaaccccggccatatcggccaactgttgctcgcgcaggtgatggcctggctcaaattttgcttcacgtatcaggtcgaggatctggttggcaagacgccttccactggcggtcgctgtttgtgtcatgaaagcaggcacctaaagtatttattgcaatgaatatacaatatcacagcgttcattattggtgaagcctgcatgtaaatccccaaatcgtgcatttatgcaccataaaagagccttgactcacaactttaattgtatttaatggtacacaaagagcaatcctgctcatgagaaaatggagtctgtcatgccgaaaaaaacttttttgcgccgatatgccaccgtatctctggctgccctttgcctgagtcttcccttgctgagtcaggcggccacgccgtcgctggttaccccaggtcagctcacctacgggactgccgccaccttcatgccctttgagttcacccaaaacggccaactgaccggctttgatattgacctgattaccgccctgtcgaaaaaactggcactcaaacctgcaccgatgtcgatggagttcaaagggcttattcccgcgctacagggcaagcgtctggatatcatcaactcggcgatgtacatcaacccgacgcgcgcccaacaggtcgacttcgtgccttatctgaaaatcggcagccgggtgattgttgccaagggtaatccagagaaaatcaccggccgtgacctgtcgctgtgcggcaaaaatattgccgtcacgctgggcggtatcgaagagagccaggcccgcgccgacaatcagaaatgcctcgacgctaaaaaatctgccatcaatgtgctgaccttcccggccgccaccgactccgccgtcgccgtcgcgcaaaaacgtgccgatgcggaatacctgtctacgccgggtgccgtcgcgctcctgagtgaaaaaggcgacacctttgaaaccaccggcccagagtttgaagccgagacccatattggttttgcggtacgcaaaggcgacaccgagatgaaaacgctgctggaaaccgggctcaacgatctggtcgcagacggcagttatcagaaactgatcaacaaatggcagttcccggcctcggtctcgattttctaatgaaaggctttgtattttttgcagcacggcaaacatcaggtcaccgtttttgcacgtcttgctccctgacattgaggagaaatcatgtcgcttgatctggtctggcaatacctgttgtcaccggcgttcttccagggcgcagtcatgaccttgctgattaccgtatgttcgctgttttttggcgtcgtcatgggattagttctggccctgttacaagagtcccgctttcgggcgggccctgttctggccttcttctatttatggctgtttcgcggcacgccggtgctgttccaaatcatcttcgtctacaacgtgctgccgagttttggcctgcgtttctcggcctttacctgtgcagtaatggcgctttcgcttaacgaaggggcttacatggccgagatcctgcgctccgggcttcaggccgttcgcagcggacagcgcaccgccggtatggcgctgggcatgactcagggtcagatcatgcgcaaaatcgttctgccacaggcggcgcgcattgtgctgccgccgatgggtaaccagatgatcagcatgctgaaatccagcgcactggtgtcggttatcgcggttcaggaattgctgttgattgccaatcagaccgccagcgccagcttccgctacttcgaagcactctgcgccgccggcatctactatctggcgctgaccactgttttcatgattgggcaggcttggctggaacgcgcgctggatccgaaaaaacgtaaaaaacccgcgttgtcactgaccgaacgcctgctgcgcagcagctcacctcaataagggaaagcggatgaaaactgataaacctctgctggaaatcattggtgtcgataaacacttcggcaaccagcacgtgctgaaaaactgcacgctaagcgtgaaacaggggaaaccgtggtgctgattggcccctcggggtccggcaagtctaccctgctgcgctgcgtcaacctgctcgaatcgattgagggcggcagcatcttttttcgccagtcggatatcacacagtccaacgtcgagcctcaccgtctgcgtcaggatatcggcatggtgtttcagaactacgagctgttctcgcacctcacggcggctgaaaacatcatgctcgcaccgatgaccgtgctgggcatcaaccgcgccgaagccgaggctcaggcgctggaactgcttagcaaggtgcggatccctgataaggccgacagcttccccgatgagctttccggcggccagcagcagcgcgtagcgattgcccgtgcgctggcgatgaagcccaaactgatgctgtttgacgaacccacctcggcgcttgaccccgagatgatccgcgaggtggttgacgttatggctgaccttagcgccgagggaatgaccagcatcgtcgtcacccacgaaatgggctttgcgcgccgtgcggccaatcacatcgtgtttatggaaaatggcgaaattatcgaacacgcgacccgcgatgaattcttcgggggatcagtgagccagagagcgcaacgtttcctcgaccagattttgcactgagttactttttctgcgcctcaccagggccttctaattggagaaaccgatgaatccatcatcgccagatatcagcagaatgaaacgagacctcgccgcgctcgtggcaatcaataccgaaaacccaccgggccgagaacgggaagccgccgagcttatcagcgtctggctacaggaggcgggatttgaccttagcctcagcgagtatgcgccgggccgcaccaacgttatcgccagactggagaacggcgcagggccgtgcttcgcctttaatacgcatatcgacgtcgttccggccggaaccggctggagtcaggatcctttcaccctcaccgagcgcgacggcaaactgtttggccgaggcgcgtgcgacgccaaagggccactgatcgcaatggttgaggcgatgcgcatgttggccagccgtccgcagagctggtcgggcacgctgatgggcattttcgtggccgacgaagaggtcgccagcgaaggcgcaaaattttacgttcgcgaggcaccggcaaaaatcgatttcgcggtgataggcgaaccgacctcgaataccacgtattcggcgcataaaggcagcctgcgaccgctggttcgcgtacacggcgtcacggcgcattcagggacgccggagctaggcgaaaacgctattttccgcgccgctcagctgttgggtctggttgaacagcagcacgagcacagcgtgcgctgccgctgtcatccgctggtcggttccgccagcctgacggtgacccgaatctccggcggccacgctgataacgtgctgcccgacagctgcgaactgctgctcgaccgccgcatggtgcccggcgaagacgaagaacaggtcaaacaggagctgcgcgacctgttggcgctggctcaggataaatttggcgtgcgcagcgagattgtcaccttcaaacccactaccggtggcgcgaccgagaccgccgtcgatgaagctatcgttcaggccggtcttgacgcctgtcgcgcacagggtctcgacgagccggggcccttcggctttcagggcggctgcgacctggtgcatttccgcggcctcggcactaagggcatagttatcggtcctggttcgctgtcagtggcgcacaagccggacgagttcgtgccggtcgacgaatttattgccgccagcgatatctatcgcgacgtggcgctgaaaatgatgccgcgaggataatccggtgaaagccacgctttatcgcgctgacctgcgctatccacatttgcagctgtttaccgccgcctccggcagcgttgccggtctggatgaactgtatctgctgctcgaagagaagtccgtcaccgggctgggcgaggtgcgtattaacattgcctacctcaacggctacagcgccgaagtggtgctgagtgacgttatccgtaccctacgctctctcgacctacagcagtcggcgagcgacctcctgctcaccctcgagacgcagttggcagactgtctggcaccgagccgcatgctgttcgacatggcgctgcatgacctgatagctcgccagcagggggtgaccgtcgcacagctgataggctccgacttcccacaaccggtctgctacgccacgaatcagacgctgttctggtcgtcgcaggagcgcatgctgagccaggcgacggcctatatggaacgcggctttagccatctcaaactgcgcgttggcattggctcatgggttgaggacctcgacaggctgagcgctctgcgccggcgttttggcaatgaggtccatctttcagccgacgccaacgggcagtggcagcctgagcaggcgcgcagcaatctgctggcgctgcaaaagtttgagctcagctatctcgagcagccgatatccgatgaaaacgcgcattactaccctcagcttgccgaggccagtcctgttccgctgatgctcgacgaaagcatgagttcagaggccgatctggcgcgtattttggcgcttgagggcaaagtctgggcacacatcaaactggtaaaaatgggcggtatcgcgcctgcggtgcgggcagcgcgtcgccttaacgcagcgggcatcccctttatgattggccaaatgaatgaaggcgcggcggccactgcggcagcgctgcacgtggcccacgcctgccaaccggcgcatgccgaactttacggtgcagacggacttggcaacgacccggtctctggcttgacctatcaccagggattagtcagcagccgaggcagctccggcctgggcgtggagtttaatccggctcatgctgaattaattcaaaccttttcgtcttaaaaaaatgatttaaatctgagagtgagagcacatgatgaataaatcttccttgccagatcttggccgcgtagtgcctggggcagagtcagcctttagtgaagcagaatataaacagcgtattgagcgtgcacgccagttgctgacgcaggcgggtctggatctgatggttatcaccggaccggagaatattttctacctgaccggccagcaaacaccggggtattacaccttccagacgctggtattgccggtcgaaggtgatccggtattcgttatccgccagctcgaatactttaacttcatctccaatacctttattcgcgacgccgctatctacaccgatggcgataatcccgtgagcttcctgctcgaggtgttgaaaacccgcggctggagcagcaaacgcatcggtatcgacaagcgcggctggttcctgccgattgccgtttacgaggcgctacaggccgagctcggcactcttcacgatggcgcaggggtaatagagcagctccgcgccgtgaagtcggcaagcgagctggaaaaaatggcccatgcggcacgttacgtcgacgcaggcatgctggcaggccgcaacgccattgcggccggggccaccgagaacgatctggtttccgccatgatgggcgcggcgattgccgccgggtctgaatatatgggcatggaaccgttggtctctaccggtccacgcaccggtgtgccacacggcacctggcgtcgccgtcgcatcctcgatggagacccagtcttccttgagatggccgcgacacacgaccgctatcacgcggcgctgatgcgctctgcctggctgggaaaacccctgccatcgcaaccgaaatggaaaaaacctgtcaggaagcgttgcaggctgcgcttgatgctatccgcccaggggcaacctgtgaagcacctcacctcgcctgccagagggtgattgaccgtgcgggctataccgacaatttcaagaagcgcaccggttattcgattggtgtttccttcgcacccgactggggcgaaggcgcgatcctcagcctttacagcggcattaccaccgaactccaaccgggcatgactttccacatcccgcctgccctgcgcatttatggtgagttcaccgtcggcgtcagcgaaaccatcgtggtgacggaaaccggttatcgcgttttaggctcagtcgaacgcccgctctttttactctaattacgcaaagattcagcaaggaaaagattgatgaaagatatctatgaaagtcaggcgcggttacgcggtattttcaacatcacagtaacgccgttcaccgcccgcggcgagttcgactttgccggtctggcgcgcaacgttgaacgcgttattgcactgggctacgacggtattttgataggcggcacctacggcgaattcccgaccatgaccacagaggaacgcgcggtactgtttcgcaaggtgatggacgtggtcggcgatcgcgtgccggtgatgctgtgcagcgccggttctgacgcacgcgcggtgagcgaactcacccggctggcgggcgaactgggcggtctgccgatggtcactcccccgtttgtttccgaggtgacccattcgcaaatcgtcagcttcttcaagcagatggccccgctctcgcgaaccggtattttggtctataacgcacccggcatcggcattacgctgccaccggcagtgctggaagaactggcggatattgagggcgtggtcggtatcaaacagggcgacctgaacccaacggcgattgaccagattgccaaccgtctcggcggtcgcctgcgtctgttctgtgcctctgacctggcgttcctgggaccgatgatgtgcggttttgacggcatcagcaccaccaacagcggcgcgctgcccgaggtgattttagccacctatcgggcgctggaaaaaggcgacgccgctaccgcgcgtgaactgcatcagctgtggtatccgtatcgtgtactggcgcgtcgccacgggcagccgcagctggttaaggccgccatgaacctgcgcggttttgacggtcatcacgtccgctcaccgctgattgaccttgaagaaggcgtaatagaagaagtgaaggctgagctgctgcgcctggcgcaagacccacgctctggcgtgaccctgaagtaatcaggtttggattaactgacctgatacggccctcagcgatgagaggccgtttttatggcttaagcgtcagccgctgcctgcaggaaagcacgcattaaaggatgcgggttttcagacgttgaggttagctcgggatgccctgcaccgctacgtaaaacgggtgcgaagcgtactcgataccgtcagcaatggcaccgtcgagacaggttgcggagatagccaacccgtagttttccagactgtctttaaactgcggattgagctggaaacgatggttatatcgaatcgtagaccgttcaccgaggatcgaggccatctgcgagccgctgcgcatcttcatcacgttatcacctaaacggtgcaacgaacgccctgccgtttcaccgagagggatgaaggtcttgactgccgcctgaggatcggcctcggccagattagcctgcgtatcaccggacatctgctgaataaccgcggtcgccatcgtctgcatccccagacacaggcccaaggtggggatcccgtgcttgaggcagtagtgggcaacgcggatttggccggcaacattttgcatatctgagccgccaggcaggataacgccgtcaatatctttgagcgtactttgcaacacgtgttcggacgaacgaggagggataaagacgatttcagtcaaggtgccttgcgcttcggcggcgtcgcccagcgaggccagcgtggcgggatagctttcaagctgatcctgataggtgccaattaatgcaatgcgcagtcggcgtgaagaagaagactgctgggtgtggtgacgctgggtgaagcggccgaagctgtcgcgccaccaggtgtttggcgcgccgtcgagactgtctagtcgatggaactgataaccctgtctgctgtgttcgacctcaaccagttgatagtccaccgagtagtttctgacttcccgcgccagccgcgtaaacgaagcaagctgcgaggggccgagcgggataatccagtctttcgcgccgtgcaggctgaggaggtcatcaagctgccagactctgcctgccgatttaccgctgaggcgctcgtaccacaggaggccgctggtcactaaatctcctgcggcggtaacgtgctggcaggcatcggcgtagcgttgcgtgtcccattctacgttcaggtgagctagctcaaccccgcgctgggacgcgagtacgccggccatcgcgccgtatatcgcgggttccaaagtgttatgtgcaacaaatgttagagacataattcctacttaacctgatggaaaaataaaatggacaagaaaatgaatgcaaccggtttacaaaatcacccaataatctgggtcattagctgcaaatttcatgccatgagtctgagtaaagtctcagaaaagggtgaataaatcatgagcaatatctggaggcccatgataatttaaaattggtttatatgattcagataatacaatactgcattaatcttacaaaagggtaacagatgtcagctgaatttactgcgccaaggctacgacgtgttcgtccatcaccgacggcggttatttcggaccgagttcgcgcactgtctgagtccggcgtcgatgtcatcaatcttggtgaaggagagttagacttcgacacaccggatcacatcaagcaggcaggcatcgatgcgattgtacaaggtgatacaaaatacaccgccgtagcgggcactgcggcactaaaaaaagctattatcaataaattctcccgagaaaaccaactgacctaccagcctaacgaagtgattgccggaagcggcgcaaaacagcttatcttcaacgcgctgttggcgaccgtctctgcgggccaagaggtactcatcccagccccttattgggtgtcctatcctgacatggtcgcgctggcagacggcgagcctcgtataatagcctgcacggaggataatggctggaagttacaggcagatgaacttaaagcggcaataacgcctgagacacgttggttaattctgaactcgccgaataatccgaccggggcagtctacagcaccggggaactgcgggcattggctgaagtgttgctggatgccccacacgtgctggtcatggccgatgatatctatgaacacctatgccatcagcccgccgaattcgctacgctggcgcaggttgaaccccgactcgcctcgcgtatcctgaccgtcaacggcgtgtctaaaggctactcgatgaccggctggcgcatcggctatgctggcggcccggcgtggcttatctctgcgatgcaaatcctgcaatcgcaaagcacctcaaacccgagttcaatatcccaggcagcgaccgtggtggctctcgaacaggacaacggattcctggccgactggcgagaagcgctggataaacgtcgacagagaatcatggcctgcatcaatcagattgatggcctgagcgccgaattgcccccaggtgctttctacgtcttcgccaactgttcgggcatgctgggcaaaacaacaccgaaaggcactacgcttgccagcgacgtcgattttgtagaatacctgctcgacgccgcccacgttgccacgctacagggttccgcctttggtgcatcgccctatctgcgcatcgcctatgcgatagacgacctgcgtctggacgaggcgtgtgaaaggatagttcgcgcctgcgcggcattacgttaagtcacctgaacgcaaagacataccctgacttgtctgaaagaggaagggttttgcccgagtgtgcgcgagtaacgcctttttttgcctcactcgcgctactttttggctcaaccttcaacaacttgagcaaagtaacagcagtcgtgcacaaatttgcagttgtcctttgacatgcaccgcgccagtcgctattattcgccccgttcacacgattcctctgtagttcagtcggtagaacggcggactgttaatccgtatgtcactggttcgagtccagtcagaggagccaaatttagagaagcccgcttaaagaaacttaagcgggctttttgcttttatctgtccagtggaaagtgtttagataaagccctttccacccatgctgattcagcgttgatgagagtaaaactctgccaatctttcgctgtcgggtaacgcggtcattgctccctttgccgtggtcgccagcgcgccgcaggtcagtgcctgacggacgattttgcgccaggcgaaatcggaacttaccggccaatcctctgccagaccagccaacaatcccgcgacaaaggcatcacctgcccccgtagtatcgaagacgttgacttgtggggccggatattgctccagggacgcctcttttttgcgatataccgagacaccctccttgccctgcgtgaccagcaaaagctcgggattatgccgctgacaaagacgcaatattccttcggacagcactgcctctcgggtcagatattccagctcttcttgagaaacttttatgatatcagccatagacaaggccagttcaaggcactcgcgcagcttattttcgtctgaccacaggtcctggcggatattgggatcgaaacatacgtatccacctgccgctttcacctgagccattgccagcagcgctgaggtgcgagaaggctcggcggacagtgcaatcgagcataaatgcaggaactgcccggccttgaaagctgggatatctgtgccgcgtaagaataaatccgcgccgggacgcaccataaacgtaaatgaacgttcaccctcggcatcattctccacaacgacggttgaagtacgatgatcgggatccagccgcataaattccgtatttacgccttcgtcattcagcgtctccagcagaaactttccgaaaggatcgtcccctacccggcctataaatgcgctgtctcccccaagacggcgaatacccaccgcaacattggcaggtgccccacctggacatttcaataagcggccatcgtcttccggaattaaatccacaaccgcatctcccaacacccaaactcggttcttcatcttcattccctgtcttcaattctgtcttattcaacatgacctaaatatagaagaaccggtttagctaactcaaagcaaatgatttttcacatcgagcaataatttgcaaacaagatcacaattccaccataacacagcaaaacaacattgcttaaaccctgagtgggtgattattgtgctgagaaaaaccagtttagcaatttagctaaacaagtttcacataataattaaacccctctgagtaataaaaatgataatgaagcctcgctatcttgctgttgctataggacttattctttcgagcaccgcccagggagccgatacctctgccacggccttagaagctcgacttaatgccctggaaaaaagaatacagattgccgaaactcgcgcggccaaagccgaggcgcgggctaatgcagcagaacaacaggttaaaacgcttgagacacgcaccaccagcaatgaacgacagacccgagaggtcgccagaaatgctgaactaactcagcaaaataccgctgagctggctaaacgaaccgaaacattagccagcaaaagccgtgacgacagcagcggttttaaattctcaggctatgcgcgttctggcgtcattatgaacagttccggcacctcgacagaaagtggtccttatgtcactcctgccgggcagaccggggggcagtcgggcgtcttggtaacgaaaataatacttacgttgagcttaatctggagcacaaccagactctggccagcggcgcaacctctcgatacaaagtcatgctggccgacgggcagcgcagctacaatgactggaccggcggaagcagcgagttaaatatccgccaggcgtttgtcgagttgggctctttgcccaccttcagcggcccctggaaagactccacgctgtgggccggtaaacgttttgaccgtgataacttcgatattcactggcttgattccgacgttatcttcctcgcagggacaggcggcgggatttacgacgttcgttggggcgataacctgaaaagtaacttttctctttatggcaggaactttgacagtctcgaaaaccgttatcgcgacgatacccgcattgagaattacatagtcaccgccaataactttgccggccctttccaattgatgcttagcggcctgcgggctaaaaacaatcaggatcgcgaaaacgccggaagtcaggggatcagcaatgctgctgatgtcggtttccacagcatgctggcttatcacggtgataccttctatggcctgcgcgaaggcacgtccaagaccgctttactctacggtcacggactgggtgcggaagtcaaagcgctgggttccgatggccgccttaccgacgaagctaacaccctgcgtatcgccacttacggcattacgccgttaagtaaaaactggagtatcgcccctgcggttctggcccagcagagtaaaaatcgctatgtctcaggcgatgactacacatgggtgaccttcaacgcccgcctgattcaacaaattaccgaaaatttcgaactggcgtatgaaggtagctaccagtacatggacttggatccccagggatacagcgataacaacaaagtaaaaggcggtttctacaaactcaccttcgcgccgaccttcaaggtgggtgatatcagcaacatgctgagccgccctgaaattcgcttctttgccacctacatggactggagcaagcagctcgacagctattccagcagtgattcattcggtaccgacggctttaccgctggcgggcaatggaattttggcattcagatggaaacctggttctgatagccgggatttgattcaaccagaggcgccctcagggtacgcgggtgccgtcggcaaatgtaaattaagggacactatgaatattaatgcaatcgcaaatgagctgcttaagttgttgggaggagaggacaatatcgccagcgcggcacattgtgcaacgcgtcttcgtctggtgctggtcgatgacagcctggtcaataaaagcgccattgaaaaagttgacggcgttaagggctgctttagtaacgcaggtcagatccagatcatttttggtaccggtctggtcaataaagtgcatgccgaatttattaaagtgtcgggtatcagcgaatcgagtaaatccgaagcggctgatatcgcggcacaaaaactcaatcctttccagcgtatcgcccgcgttctgtcgaacatctttgtgccgattattccggccattgttgcttcgggcctcctaatggggctgctcggcatggtgaaaacctacggttgggccaatcccgagagcgccatttttatcatgctcgatatgttcagttcggcagcctttatcattctgccgatactgattggtttcaccgcagcgcgcgagtttggcggcaatcctttccttggcgccaccttaggcggcattctcacgcacccagccctcactaacgcctggggcgtggccagcggtttccataccatgaattttttcggcatcgagattgccatggttggctatcagggaaccgtattcccggttcttctggcggtctggtttatgagctttattgagaaacgtcttcgtaagctgattcccgacgcgctggatttaattcttacccctttcctgacagtgattatttctggctttatcgccttcctggtcattggcccggcgggtcgcgctctggggacggcatctcgtttattctcagcacactgatttcgcacacaggctggatggccggtctggtctttggcggtttatattcggtcatcgtgattaccggcattcaccacagcttccacgcgattgaagcgggattactgggcaacccgaatattggggtcaatttcctgttgccaatctggtcaatggccaacgttgcccagggcggtgcctgcctggcggtttatttcaaaacccgcgacgcgaaaattaaagccattgccgtgccctctgctttttcagccatgcttggcattaccgaagccgcgattttcggcatcaatctgcgattcatgaagccgtttatcgccgcactggtcggcggtgcactcggtggagcctgggtggtcgccatgcatgtcaatatgaccgcggtgggtctgaccggcatcccagggctagcgatcgttcaggccagttcaatcctcagctatctgatagggttaactctcgcctttggcagcgcattcctgctgtcgctgctgctgaaatacaacacggtgagtgaatcatgacagaatctagtttgctgaagcaggcactgcacagcgttatctcgggtcagctccgtgcagccaaggatccttaccgacccggctggcacctcgccccaacggtaggactgctaaacgatccgaacggatttatccagcacaatggccgttaccatttgttctatcagtggaatcctctggcttgcgcgcacggcgccaagttctgggggcattggagttcaagcgacttggtcagatggcggcacgagcctgtggcgcttgtgccctccgaggcgtttgagtcacacggctgctattccggctcagcggtagcagataatgggcaactcacgctgatttataccggtaacgtcaaatattcgcagggtcgtcgcacggcctttcagtgcctggcacgtgaaaatgccgcagggcaatttgataaagaggggccggtaatgggtttgccggacggctataccggccatgtccgcgatcctaaggtgtggcgtaagggagagcactggtacatggttctgggcgctcaggatctgaaccttaaagggaaagttctgttgttgcgttcgcccgatttacagcactgggagctgctgggagaaattgccggaacggggcttaacggactcggtgaattcggctacatgtgggagtgcccggacttatttaccctggatgaccacgaggtgctgatttgttgccctcagggcttagcggcacagtccgatcgctatctgaacactttccagtctggatattttgttggccaacttgactatgacaaggcggattttcagcatggcgatttctcagagttagatctcggctttgaattttatgcgccgcaaacgacacacaccgatgatggacgcaggctgctcattgcctggatgggagtcccggacggcgatgagctttttcaacctaccgtgcaaaatggctggattcataccctgacctgtccacgagagctggagcttaacagcggtaaaattattcaaaggccggcacgggaactgcaacagctcagagggccgcaagaggcgtggcaggggatcgccagagatgcgccggtgtgggatatcaagcacgctgaaattgaacttgaaaccggacatcctttcgaggctgattttggtggctgcctgctcctgcaatgggagggtgaatggctgcgcctgacgcgtaaaaatcgccgcactgggctatcggagcaacgcgtctggcgaggagccttacgcaaactgaccattatgtgtgacagttccagcattgaaattttcatcaacgacgggagtgcggtcatgtcgtcacgctatttccctgttttaccagcacaattaatcttccgtggcgatcgtcagattacgttgcgctactggccgttggcggattgcgtgttagaataaaaatctttccggacaacagaatatggcgcagtgaaaaagacaaaacgtatcactatcagcggaatagctgaactggctggcgtatctaaatcgaccgccagccaggtactcaacggacacagcaagaagtttcgtatctctgatgcgactcgtgaccgtgtactggccgtcgccgctgaacatcactatcagccgagtattcatgcccgatcgcttaacgtaaagcgcagctatacgctggggctggttgtgccggaaatgaccaactatggttttgccgcctgctcaaacgagctggaaacactttgtcgcgagaacggcatgcagttgcttattgcctgcaccgatgaaaataccagtcaggaaaccatggtggtgaataacctgatccagcgtcaggtggatgggctgattgttgcatccagcatgcttaacgatacggaatatctgaaaatcagtcagcaattgccggtggtattgtttgaccgccacattcaggacacgtcattgccactggtggtgtgtgaggcgatagagtcttccgcagagctggtcgccagagtggcaagaaagcatcaggatgagttctattttcttggaggccagccgcgaatctcccccactcgcgatcgcctcgcgggttatcaacgcgggcttgagcgagcaggcgtcaccccaaaccctgaatgggtcctgtacggcaattatcatcccagttcaggctacgaaatgtttgctaacctttgtgctcgtctggggcgaccgccgaaagcgatttatgttgcctcctgtggcttgatggagggcgtgttgcgctacatgagccaacataaactgctggagagtgatatccatttatgtagctttgacgatcattatctctacgactcactcacggtaagcattgatactatcgcgcaggactgcaaagagctggcgacacactgcttcaacatgatgacgagtcttatcaatgaacaacccgtagaacaaatgcagtcttatctctcaccaaaactccagtggcgacatgctaattccactcagtcaatcgattgaaattaaatgtttcatcgtttatccagggcctgataacggcgggctgaaggtgcgatcattggggtcgtttaggcggtgatttatggctttcctccccacgcggccgcctcgcccttaatccactgaataaacgtctcgacttcaggctttttctcaccgcccttgggcgtgaccagccaatagggccacgggtaagggaccacatgctccgtgagctgcaccagttctcctcgcgcgatggcccccgccaccagcgagcggcgttcaagcgcaatcccctgccctaaacgcaccgcttccagcaccatgttcgaatcattgaagcacagccctgagggggtaatgtgccgtgtaagccctgcttcgacacaccacgccttccaggactccatcgaaaaaatgatcctgctgttagcaatgtcctgtgccgtttgcggtaaacacccgccgttaaaattgggtgcactgaccacccactgctggtcctcaaacagaaaatggctctccagcccctcccaatcgccctttcccatgcgaatagcaatatcaaccgactcctgctgcatattagtgacggtgagactcgccaatattcgaagctggatatgcgggtattgccggtgaaaatgttccagacgaggcagcagccaatgtgtgccaaaggaaggcactaccgcgagcgtcagctcggcaagccgcggtttgacctgcaataagcgggttgcatccgctatctgaccgagggcattacgcacgtggagcgcgtataaacggccctcctcattgatgtgtacgccgcgcccctggcgcagaaacagcttcaccccaatgaaatcttccagcacttttatctgctggctaatggccgagtgtgtaacgtgaagctctttggcagcctgtgtgacactgcccagacgcgcgacggcttcaaaactgcgcaggctggcgataggaggataatctgacatagggcgacctttagcgtgcaggaaaggagacaggttagctttactgacagtttcggttagaaacgggaaatatctcaggccaacagcttgctgtaatctatcactattctcaagaagaaacggctatggcggctcgccatgcgttagcaatattatcaatcaagataacttttagggcaggaaaaaaagatgaagctgatcggtatgctggattcaccttacgtcaggcgcgtggcgatttcactggaactctatggcgtcaagtttgaacacttcccgctctcggtattcaggcatgtcgaggccttccgcgagattaatccggtggtgaaagccccgaccctggagcttgataacggtcaacgtctgatggactcgacgctaatgatcagtttctttgaaacgctggcgacagctgagcacaaattactgccgcagggcgctgaagcgctggccgaaagtcttaatattttaggactgtcgctggccgccagtgaaaaagcggtgcagcatgtctatgaacacaatctgcggcctgaagaaaagcagcaccaaccgtggatagaccgcgtgacccaacagctgatagcagcctgtcagggtgggagaccgcgctcaagaaccgcaagcatggttcagaaaaaatagatcaggtcggggtcaccagcgcggtggtctggagctttatccaatcgatgatcccgcaagtgtttgaaggttatgacttcccgcatatccagagtctgaccgacaaaatggagaaccaaccggcgttccagaaatatccctggcattaaaatgtgatccctgctgcctgcgtctggaaggtcaacgtccagacgccgcttgccgcccctcgcctctgcctcctcgccgcacagaccattcacactgaattcacaaataaacaacgaacaaaaccaaatacttacaattttctacggtgaggccatttcatcaacaaaattgacggttttaggcaaaaaatgaacgacaaaacctcgggtgggagagtagaatgcccaacttgtgcgttagatcacaattttatctgctacgctctttctttatttatcctgaacagaaacaacgtaatttcccaagaagttatcgaagagcttggtcttctggtctgagttcagattactggtcactcattttttcctggttttaatttatgcaaacaacaatgtcttcacgctcagagggctggttcagagtactgagtttgactctggcagcattcatctttaataccactgagtttgtgcctgtcggtctgctgacggacattgcgcaaagcttctcgatgaccgcggctcaggccgggataatgctcaccgtttacgcctggattgtcgcccttttctctctgccgctgatgctgttgaccggtaagatggagcgtcgcaaactgctgatcggcgtgttcgtggtgtttatcgccagccatatactgtccggttttgcctggaactttatgattctgatggtttcccgtgtcggtattgcgctctcacacgccatcttctggtcgattaccgcgtcgctggcgctgcgcgtggcacctccaggtaaaaaggcgcaggcgctcagcctgctgaccaccggtacggcactggcgatggttctgggtctgccgttaggccgggttattggtcagctgcttggctggcgtgcaaccttcctgattatcggcgcaggcgcgctagtgacgcttattctgctggtcaagctgctccctctgctgccgagcaacaactctggctctctcaaaagcgtgcctcagttgttcaaacgtccggcgctggtgctgatttatgcgataaccgtcatcctgtttgcggcgcattacaccgcctatagctacatcgagccgttcctgcagaaggtctcgggcgtcagtgagaactttaccaccctgctgctgctgctgtttggactggcgggtattgtgggcagctatctgtttacgcgcatcaaccaccgcttcccctccggcgtattaatcgcctctgtcgcggtgttgttcctgagtctggtgctgctgttaccgctgtcgtttaataccaacagcctgattattatgtcgctgttctggggtatggcgatgacgatgattggcctgagcctacaggtgaaagtgctgtcgatggcgcctgacgccactgacgttgccatgtcactgctgtcagggattatcaacattgccatcggtggcggcgcgttgataggcagtcaagtcagccttgatctgaacatgtcttacgtcggctacgtcggtggggcgtttgcgttgattgggttgggtctgacggtgtataccctgcgtcgctacggacgccagctcgccgactccgccatgaccgaaggcagcgtgctgcactgatatttctgcaccgctttgcgttaatcctaaaagcccggtatgcgtttcatcgcgcataccggacgacggacaccctccaaaacctcaatttttcccttccgcatttgagaaactgttttgtaatgcgagattcagcgccaacacattaactctgggttcgccaaagataccgaaagtcggcttctgaatatgggtaagaatcagtgcctgcacttgcgacagtgaaacagcgcgcgctttcgccacccttgatgcctgcaagagagcgttatccgggctgatatcaggatccaatccagaggctgaggccgtcaacatatcagcaggtaatccttttccctgcaattcgggttgcacagtctctaacgctttacgatcggcggtcaggcgatcgcttaacgcctggctcgtcggaccgaagttagaaccgctcgaattacctgcgttataaggtgctgcaatcgttttagtcgcatcatttgggtcagtatccgtggtagcggatgcgcgaccgtgaaaccactggttaccgctccaattctgcccaatcagagatgagccaatcatattccccttattgtcagtaatgatgctgccattagcctgcactggaaaaattatttgcgaaaatccgttcaccagaagtggataaaccaggccacataaaagccaggtgacggcggtaattcgcaaagaactgcttaatatactcaacatttgccacctcttacatcacgagagacaagcacagatcgataagcttgatgcccagaaatggcgctgccagcccaccgatgccatagatcatcaggttccgataaaacatcgcctctgcgctggtcggaataaatcgaacaccgcgtaatgccagcgggattaatgccggaataatcagcgcattgaaaatcaacgcggagagaatggcactttgtggtgtagataaccccatgatattcagatgagataatccaggtaacgccacaataaacagcgctggcaatatggcaaaatacttggcaacatcgttggcgatagaaaacgttgtcaaggcaccccgcgtaatcagcatttgtttcccaatgctgaccaactccaataatttggtcgggtctgaatccaaatcaataatatttgacgcttctttagctggcatggtcccggtatacatggccacgccgacgtccgcctgtgccaaagcaggtgcgtcattcgtcccatcaccactcatcgcgaccagtcgtcccagcgcctgctctttacggatcaatttgagtttgtcttcgggcttggcttccgcaatataattatccagtcctgcttcggcggcgatgacgctggccgtggtcgggttatcaccagtgaccatcacagtccggatccccatctcgcgtaattgtattgcacgttcacgaatacccgacttaagtacgtcagataaggcgatgatgcccaatatctttccatttacagcgaccgccaacggggtcgcaccgcgcagggccacgctttcagccagagcatgaaggtcgggcggaatgtctgtgttgtaggtgcgctgcacatatttgatcaccgcatcaaccgcccctttgcggataatccgtccgtccggcatgtcagtcccactcatgcgcgtttcagcggagaaatcggtacctacggcctgttcctgctgaggttccgcgctggccccttgctgggtcacgtacgctatcgttgattgcccttctggcgttgaatcaaacagcgagccgagataggccgcctgaagcaagctctgctgactttgccccgccacggctaaacaggccgtggcctggcggttgcctatggttatcgtccccgtcttgtccagaatcagcgtattcacatcccctgccgcctcaatagccttgcctgaagtcgctaacatgttaaaacgcatcgttctatcaataccggcgataccaatcgttgacagcaatgccccaatcgtcgtcgggattagagcaacaatcagcgcaaccagatcggcgacgttaatctgcgcatgcagataactggctacaggcgcaatcgccgcgacgacaatcacaaaaattagcgtcaatacggacagcagcacggtcaaggcgatctcattcggcgttttttggcgcttagcgccttcaaccaaacggatcattcggtcaagaaaggtattacctggcaatgccgtcactttgactatcaagaaatcggacaacacccgagtccccctgtgacagaggaagccagatccgatccggattgtttgattactggagccgattcaccggtaatcatggattcatctacgtaggcaacgccttccacggcttccccgtcaatcgggatcagctcttctttttcaaccctaagccgatcgcctaatttcaggtcaatcgcagaaatagtgacccaggtgttatccgccaatattttacgggcactcagcgtggtggtggtatggcgtaaagatgacgccttggccttgccacgcccttccgccaacgcttcggctaaattggcaaaccagacggtaataagaagaattaacgtcacgatgccgttgtaaccggaactggcgtgggacggcccgaaaagtaacggatccacggtcagtgcagccgttatgcaggctccaatccagaccacaaacatcaccgggttacggatctgcacccgtgggtcaaattttttcagtgaatcgatcaatgcacgctggaaaagcgcagtgctgtatccgccgtgtttaggcgcgtcggaaggcagagtcagtgcaaacgttgttttcatttctgcaactcctatgaacgtcaatctgcgacctagaacaattggtgattgatcatggcgaagtgttcagctattggccctaacaggagcgcgggcaggaaggtcaacgccccaacgattaaaatcattgccagccaccatgcgccgaataacagagtatcggtgcgtagggttcccacactcggcggcagcgtaggttttgctgccagcgaccccgcaacggccatcagaaaaatgatcggaggataacggccaagcagaatgaccagcgcaatggataagttataccagggcgtattggcattaagtccggcaaaggctgaaccattatttgccgcagcggaggtgaaggcatacagcacttccgagtaaccatgcatgccggcattgttcaacgccgagacgccgaaaggtaaaatcattgataatgatgacggaataagaatcaccattgggtggatcaacagcgccaacgacaccaaaatgatttcacatttttctatctttttacccataaattcgggtgtatgtcccaccatcaacccagcaacaaaaatgccgataaagccataaatcaggaaactgaggaaaccgacgcctttccccccaaacacgcattgcagcatcatctgtatcattgtcggtagactgcccagaggggtaagactgtcgtgcatcgcattcacgctaccggtggtaaacgccgtggtatacgcggcatataacccactgagcgcgataccaaagcgcacctctttaccctccatattgccgcccggctgcccgacaccgctgtgcagattgatccccgcctgctgaagcaaaggagtacccgcttgctccgggagtacggtgaaaatcaaaaaaccgattaacatcaccgccatgaccccatagataacccagctttgacgtcggttattaatcatgcaaccaaacatcaccactagtgcagcgggtaagcttgccatcagcaacaacagcaccatattcgtgagggggttagggttttggaaagggtgcgcggcgttgacgttataaaagccaccgccattggtgccaaagttttcaatcgattcctgtgcggcaaccggaccgagaatcaatgtctgatgtccccttgaacagtattcacaacggtgctggcgttcagtgtttctggaaccccctgccaaacgagaaacagcgcagcaataatggccaccggcaggagtacacgcgtaataaaacgtgtcatgtcgcgataaaaattccctaaattatcgtttcccccctgaaccaaaaaagcacgaataaaggcaatggcgaccacaaaccccgttgccgcagaggtaaacataggaaaagtaatcgcggccatttgactaaagtttgatagcgtattttcacccgcataactctgccagttggtgttagtaataaaactaatcgccgtgttaaatgcctgcaaaggttccataccgcttaatttcagtggattaagaggaaaatggttctgtaatattaagatgagataaatcaacagtgccataaccaaattcgtggctaacatattgatagtgtattttttccagttcatcggctggctacaggtgttttttcccacaattctatagataacattatcaatgggattaaacagaggatccaacaacgttttctgatcggtcacaacacgcgaaagatatcgacctgctgcaatactcagcagaaacgtcgccaacagagccagtccagcttgcagccatagatgtagcatcttatgactccttcagaataaagtaagcggagatatcccgacactttaaaacttatcgggatgggttacggcataaaacaaataaataatcacagcgaaagtgatcgttaccaatatggaaatcgccatatttaactctccataaaaataataacttgagggccgtatttactttattttttcatccgatgaaaccttgatgacattccctgcaaaggagatcaatacgccaaatgaggcataggccagcaacatcacaatcggcattaataatattaaccacataaaacactccttataccgcagtgataaatagtgtgggttatcgtgacgactctataggtataggagcaggcagataaaagctttataaaggttcaaattagcgggataaaaataatgtaaaaaccatgaaaaacgaaggatgaaatcaacgatctattgcctcacgtcacggctttcagacgtcaacgtgtttaacacggttgcagcaccgcctccacgccagcacagtcttgaaaggcagcggcacgggtggcgggctcagtattgattcaaatggcctgagggctgaacggatttattcgagcatcgctattgcgctcagttcgtcggtgacgagtccactcacccagccgccctgcaatgccgcgcgcatcgccagatgtttctccgcgccgccggccatggcgatgacgggtttatccgccttcggttgcaggctcacgctggttaatcttgcattgagttcgctgtcgatacgttgcccgtctgcgccgatgaaatgcccgaccatctctccgacggcgcccgccgcattgagtttttcgacctgttccagcgacaggaacccgtcgagatgcagcgggcagtcgggaccgatagtgccaatgccggtaaaggtgacatcggcctggctggctttctcgctgacggtgcgataaatacggtgatgacaccagccctcgcgatcctgctcactgtcggcaaacaagggcgcaggcaggataaaatagcggccctgcgttttctcggccatcaacagcggcacgtcgtaacgggtacaggaaccatcataggcaatcgcgcctatcagcgacacgcagctgtgctgcgggcgttcaatgtcatcaagttcatcgatagccgccttcaaggtgcgccccgagcccacgccgataatcgtagaggcttcacggcgaataaactgggtcatcacctgcgcacccgcgacggcaatggcgtgcagcaatcccgtcttactcattccctgagcaggaaccacctgacaaagactcaggccataagcctcgcgcaggcgggcttcgagcgccatgcagttgccgaccgagtgcgaaatatgcacgctcaccaacccgctttcaatcgcactggccaccagccgctgcgcaacctgacgtgagatgcccaacgcttcggctatctcatgctgcgtttgtcctgccacgtaatacatccacgcagcgcgcgcggcctgatccaattttttatcattcttgttcatctctgacctccatccgggcggtatatgccgcgcattttatcgggattcatcattctgagtgatgtcgatttagcaaaaaataacaatattgtgagctaaagcccatttaatgggcaaaagtttatttaagctgatcttcaatcaggcaaaagcccacacaaagagcttatgcccaaaatgccttcactaccttttcggagcaaactatggttacttcttggcactcagcggtttggttgcacattggcgcaggttcgtttcaccgtgctcatcaggcgtggtatctgcatcggctgatcgaggccggtgataataactggtcgattgcgctggggaatattcgcgacgacgccacgccgttgctgaataatctgtctgctcagggcggtgaatacgtgctggaaacggtgaccccagcgggagagcgcgcctatgaaaccattacctcagtcaagaaaatcatccctgggacgcagagctctcgcagctgattgcgcagggcgagaaatccgcaacgcgggttatctcctttaccgtcaccgaaagcggctattatctcgataaccagtttaatcttgaccagaacaacgccgacatttgcgccgacctacagggcggctgccgcactgtttatggtgctatcagccatattttgcagcagcgccagcgcagcaacggcgggcccgtcacgctgctcaactgcgataacctgcgccacaacggcgaccgcttccatcatggcctacagcagtttttaaccctgagacaacaaccggcgttgttgcagtggattgccgacaacgctcgctgtcccaataccatggtcgaccgcatcactccacgcccatcacccgaggtcgccgtgcgcgtcaaagagcagaccggtaaggatgataaggcaccggtgatggccgaagcgtttatccaatgggtcgttgaggatgactttatcgccggtcgccctgcgctggagaaggtaggcgttgagatggtgaaatcggtagtgccttatgaggaagcaaaaatccgcatcctcaatgccagccacagctgcattgcctgggccggtacgcttctcggacagcggtatattcatcagagcactcaaaccgagtcaatttgtcagatggcataccgctacgtcaccgaagacgtgattccgagcctctcccctagcccgcttgacctgaaagactaccgtgacgtggtccttgagcggttcagcaacccacatattcaggacaccaatcaacgcgttgcggcagacggattctcgaaaatcccaggattcatcaccccaaccctggtcgagtgttatcagcgcggtgatgtccccgcgccaccagccagctgccggcgttgttcttcgtgtttatgcaacgctgggcacagaatcaactgccctacgaatatcaggatggcattttagattctcaggccgtaaaacagatgttttccgccaaagatcccatcgccgagtatgcgcatgacagtaaacttttcggtgagttggcgtctaaacccgaatttgagacgctgctgcgtgaatcgattgcgggcgtttatcaatggcttgagtctgcgaagcagggctaacaggagtcgcgcatgtatttaggactggatttagggacctcggaaatcaaggcgttggtgctggatgccgagggcaaggtgatagccagcgcgggcgaagcgctggaggtgcagcgcccgcgcccgcactggtcggagcaacgtcccgacgactggtggaaggcgacgcaaaaggtggtcgccagactgcgcgaccaggtgcctcaggcgtgggcaaacattgttgctatcggcctttccgggcaaatgcacggcgcggtgctgctgggccgcgagggagaggtgctgcgccccgccattctgtggaacgacacgcgcagcgccagagagtgcgagctgctaacgcaagcagccccgcagctgcatcagttagcgggtaatctggcaatgccgggattcactgcgccaaagctgctgtgggttgcgcgacatgaacccgaaatttttagccagatagccacggtactgctgccaaaagactatctacgctggaagatgagcggcgacaaggtttccgatatgtcggatgcggcggggacactgtggctcgacgtcgccaaacgtgactggtcagataccctgctcgacgcctgtggactttcgcgcgaccagatgccgcggctagtcgaaggcagcgcagtttcgggcgtgctcaatcgcgatattgcccgcgcgtggggttaaacagtgaggtgattattgccggtggcgggggcgacaatgccgccagcgccataggtattggtgcagtagagccgggcgatgcgtttatctcgctgggtacctcgggcgtactgtttgcggtaaacccaagctttagccctaatccagacagcgcggtgcatgccttttgtcacgccctgcccgaccgctggcatcagatgagcgtcatgctgacggcggcgagcgcgctgcgttggtattgccagctgattggcagccatgaaacgacgctgctggcagaggtggcccaactcactcaggccgaaaaaaggcaggcaccgctgtttctcccctacttgtcgggagagcgcacgccccacaacgaccctttggcggtcggggcttttcacggcatgacgcacagcacgcagcgcgcggcgctggggtatgccgtactggaaggcgtggccttcggcatggccgacgggctgagcgtgctcaaacagtcgggcactcagctgagccagtgttcgctggtcggtggcggtgcacgcagcgacgaatgggcgcagctgattgccgacgcgcttaatctgaccatcaccacccatcaggacggcgaggccggggggcactgggcgcagcccgtcttggttggctggccgcaggcggtgaacaaagcaaggtctgccgcaagcctctgacaaaaagactttctcgccggacgccgcacgccatcaggtgttgcagtcccgactggcgacctggcgcaaactgtatctacagcaggtagagctaagacgataacccctgacatcacaataaaacccgagggcggccacgccccattcacctcattgataaccaaaaactgagggagccacgctccccagaggagcatgctatgcaaaaaaaacaggcccactggtttggtttaccgctcaatctgctgtggggatatatcgccatcgccgtgttcatgagcggtgacggctttgaaatggcgtttctgtcgaaacatattaccgatatggggttcagccctgccgagtccgcgctggtattcacggtctatgggctagcggcggcggtagcggcgtggagctccggcgtagtggctgaaatcatcactccacagaaggccatgcgcatcggctttattctgtggctggtgatgcataccctgtttatgctgtttggcttaggcatgaaaaactatccgctgatgctgctgttttacggtattcgcggccttgcctatccgttgttcatctactcctttgttatgctggtagtgcagacggtgccgaaacagcagctctcctcggcgatgggctggttctgggcaatgtactccatcggtatcggctgtatcggcagctacctgccgagttttaccattccactgtttggtgaaaccggtacgctgtggtttgcgattgcctgggtcggcgtcggcggcatgatggccctgaccttgctgcgtaacgtgggcacacctagtgaaaaggccaacctcacgccgaaagagaaactgaccgaactttctcgcgcggtgactatcctgttcaccaacccgcacatctttatgtcgtgcctgatccgcattatcaacacgatttcgctgtttggcttcgccgtgatcatgccaatgctgttcgttgggcgtctcgggtttagcatgtcggaatggctgcaaatctgggcggtattcttctttgtgaccatttttaccaacatcatgtggggaattcttggcgagaaaattggctggctgcgtcaggtgcgttggtttggttgcatcggctgcgccatttctagcctggcattttattatttaccgatgcatttcgggcacaacgtcgggatggcgctggtgcccgccgtgatgctaggcatcaccgttgccgccttcgtgccaatgaccgccgtgttcccggtactcgaacccaaacataaaggcgcagcgatttcgatttacaacctctcggccggtttgagcaacttcgtagcaccggctatcgcctcaatggtgctgccattttttgacatcgtcggcgtagtctgggtctatacggcactgtatttagtggcggcagtgttaacgctgctagtgaaagtcgaccaaccggggcacagtaaagtgccggttgccacacagcacaagattgagtcagagccgtattaagtcctctgccgggtcaaggtcaagacaaggttcttgaccttgaccctcgacgctgatttaacgcggctgccacccgtcggggatgacaaactccggccgccggtgaagggcatgaagaaaatggcacgctgcgctccttaacttttcaaaattaaccttgttatgctcgcccatatctcgcagcacgcgcgggtcataaaacggcatccccattccataggccacgccaataaggcgcacctcatcgctaacagcaatatttcctgctccctgccgcgccttaaaatcctggatctctatctgtaattgcctatatatccgctggcgattctcccgcgataaattaagaaaaatttcggcatagcctttattaaagctgctaacgacgtcgacgacaagatagggcgtactgcctgttaaggcactatattgtgcggtggattctgtcgtggattgtgtcgtggattctgtcgtggatcgtgcagttaattgcctctcgctatctgctacaggttgcgtgatttcaggcttttgcaggcgacagcgacgaaccggtcgggccaacgacaggctctgcggcagccgaggggtattcatgatactggtaatagcaacgggatttttagtctgctcgcacggcaagttaactgggatccatttcgttattctcggcgaagcgtcagcattgttcagacgattatccatagcgttccctcaatttatttaattataatcaggatgccagtaacataactcgcgccgttttttaatctataagatttcaatcaaattctactcttcgcgatcaataaacgttgggagcttcagtgaaaattaacgtcattggcaccagtggaagcggtaaatccacctttgccaaagcgctggcgcagcaattagctattccttatatcgagatggatacgctgttctggaaacctcattggaccggaagcagtgatgcagaattatttgaaaaactcgaacaggcgatttcccaaccgtcctgggtgctggatggcaactataagcgctcgcagccgattaaatggcgcgatgtcgatatcattatctgggtggattacagctttggccgcacgctgtatcaggcggtcaaacgcgcactgcaacgggctagccacggtcaagaattatgggccggaaccggtaatcgtgaaacttttcgccagagcttttttagccgcgagtcaatcatcctgtggacgctgaaaacgttctataaaaaccgccgtcagtatcaaaagatgatgatcagtccgcccaatagccaagtgcagtttgttcgcctgcgttcacacaaacaggcccgggcgtttatcgactctctcgggttgcaaaacgccgcagcaaaaaaaacctgacataaaagtcaggttttttatcggtacgtctcgctaagcgcaagaagacggcgtcaggaatgcttagtaatcgacgccgttctcggcgatatccatcgcgaagtaagacaggatgatgtcagcaccggcacgtttgattgcacccagggtctcgcgcaccactttacgttcgtcgatggcaccggcctgtgcggcaaacttgatcatcgcgtactcgccgctcacctgataggccgccagcggcagacgggatgcggcgcgaatgtcgctgatcacatccagataagccccggcaggtttcaccatcagcgcatcggcaccttcctgctcatccatcaaggattcacgaattgcttcacggcggttcatcgggttcatttgatagtttttacgattaccctgcagcacgctgccgcccgcttcacggaatggcccatacagtgaggaggcaaacttggtcgagtacgccatgatggaggtatcgataaaaccggcttcatcgagcgcactgcgaattgcctgcacctgaccgtccatagcagcagaaggtgcaatgaaatcggcaccggctgcggcggcaaccacggcctgacggcccagatttttcagcgttgcatcgttatcgacgccgtggtcgtgcagcacgccgcagtgaccgtgggaagtatattcgcagaaacaggtgtcggacatgacgatcatttccggcacggtgtctttacaaatacgcgccatacgcgccaccaggccattttcattccaggtgtcgctgccggtcgcatccatgtgatgcgaaataccgaaagtcatcaccgaacgaataccggctttggcataacgctcaatttcataagccagttttgactcaggaatacgcagtacaccgggcatggtctcgattaccgcgtattcggaagtctcttcttctacaaagattggcaatacaagatcgttaacgctgaactcggtttcctgaaacagcgcgcgcaaagaatcagactgtcttaaacgacgagggcgtaaattagggaactgtgacatgactactccagcaaaaaagcgatttctagactctctgcggctataaaagctcgcaaacggtgttggtacaagaagtacctaccaaaaataactgcggagtattttatctgaactcaaaacgaattatttatctttacgtagcaagtttatcaacaaatattacgtcagcacccaatgtccttcgctgacctgacgatagttgcgggttgagggctgatagccaagcggccgcaccgggctcttcagctcgtctgccttaatgtggcgcttaatgccgcgccgcgcgggatcgggtaccggcaccgaggcaatcagcttgcgggtataatcgtgctgcggattatcaaaaatcgcggcgcgcggcccaatttcgacgatttcccccagatacatcaccgccacccgatggctaacccgctcaaccaccgccatgtcatgtgaaataaacagataggacagattcatgctctcctgcaggtcgagcagcagattgaccacctgcgccttcaccgacacgtctagcgccgaaacggattcgtcagcaacaatcaccttgggatccaacgtcaacgcacgcgcaatacagattcgctgccgctgaccgccggaaaactcgtgcggatagcggcgcatcatgtccggcgacagccctaccttgtccatcaacgcggcggccttctcaagcgcctcagccttattcgccagacggtgttgtaatatcggctcaatcagcgcgtcaccaattttcatacgtggattcaggctggcgaagggatcctgaaagatcatctgtatccgctggcgcatggcgcgcagatccgttttgctcagattcatgacgtcgaagccatcaaagtcgatctgcccgccgtaaggcttcagcagtcgggtgacggcgcggccggtggtcgatttcccgcagcctgattcacccaccagcgatagcgtctcacccgcgaacaggtcgaagctgatattttccaccgcgtgcaccgcgccaaccggtcgtcccaaaatgccgccgcgcaccggaaaacgtgcgctaagattcttgaccgacagcagcggcgtttgccgggcgtcaacctgaatggcactttcgcgcggttcgttcgccagcccagtttgcctgtctatcgtcgggaaacgcagcggacggctgcggccgcgcatcgaccccaaacgcgggaccgccgccagcagcgcgcgggtgtagggatgctgtgggtcacggaacaaatctgccgtatccccgctttcaaccacttcgccgcgatacatcaccagcgtacgatcggcaatttccgcgaccacgcccatgtcgtgagtaatgaacagtaccgccatgccctcttcctcttgcagcgtcttgatgaggtcaaggatttggccctgaatagtcacgtcgagcgcggtagtaggttcgtcggctatcagcagcttgggcttaagcgccagcgccatggcaatcataacccgttgacgcataccgccggaaaactgatgggggtactcgtcaaagcgtgcgctagcgttgggaattctgaccttttccagcagtcgcagcgtctcttcgcgggcggccttgctgcccatgccgcgatgcgttttcagcgtttctgcaatctggcggccgagggtaaaggtcgggttaagcgaggtcatcggctcctgaaaaatcattgccacctcgttgccacgcacctcgcgcatctgcttttcagaaagcccgagcagtccgcgctggttgagagtaacactgccttcaatcttgctggttcgcgccttgagcaggcgcatcaccgacagcgaggtgacgcttttccccgagccggactcccccacgatggccagcgtttcaccgggatagacttcaaaagataagttgcgcaccacgggcagccagtcgtcgtcccctgaaaggaggtggtcaggttctctacctttaaaaccggctgcgcagtggccatattttttatcctttaattaaagagaagttgaacgggcagagactttgacttcaggggtaaaggtgaaatctttatcgaacggaaaagtcggcaccgttttacgctttcgcggcagtcgctccacgaactgatcgaccacgccgtcggagagcgccatcagattaggtcgcgcaatcggcgccagctcaggagacagatagccggatttcaccacgacgacgttggcctgctgcgggtcgaggccgagctgcgtaaagtcggcaatatggtgataaggcctgcggcgagcggagaccaccacgtcgatgccgttgacgtgcagcaccgcctgtcgttcagcctggttcggtgcatctagcaaacgcagcacggtaaattcggcgtgcacctgcggactggacggatcgagagaggcacccacggataacgttatgcgcgcgtcgacgcccgcctcgaaggcggcctcggtcgcaggctggtcggtaataccggcaacaatgacgcccgtcgcgccctgtttgagtaactcggccagaaggtcggcgcggtcgcctacgccaccgccggtgggattatcgccagaatcggccagcaccaccgggtgcgtctggctggcaatagcgtcgcgcacgcaggcttctggcatgtccgttttgcagccaaagacaaagtcttcacgcgcgtcccaatacgcctgcgccagtttgatggcctcgcgttcaagcagcgggcgatcggtaccggtaaaaatagccgccgccgtggcacgcggctcgtcggcccaaacgtagccgaccatcagcgagctatcccacacgccctcaatctggtcgagcgcgggcagacaggcatagagacttttcgccggttcatcctcggtactggtccgttcgcccggcagcacgaccgggattggcacccaaagcagggtcggcctgacgccggtttgcaggctcttgaccagcatggaaatcgaacggcgcatggtctcttcgacgtcgatgtgcggcgcggtacggtaggtcgaaaacaggtcgatggcgtcgatgattttctgtgaaacgttgccgtgcaggtcatagctgacgctaatcggaatatcaggcccgacgacctcgcgcgcggcgctaatccagtcaccctcggcgtcttccatgccctcgacgtacatcgcaccgtgcatcgccagataaacgccgtcgtagggtttgtgcgcctcgagccctgccagcatctccgccttgaacgcgtcgtaggtggcgcgggataccggccctccggcgatggcccgggcatgaaccgtgggtaaaaaggtcgcaggatagtcctgcagaaaggcaaaatacggtgccgccagcaacgcatcgttgcgcaccacgcggaaatctttttcttcattaagaacaggattataagtgctgcattcgatatgaataccgccaacggctatacgcatcttctacctctacgggttgtcagggccatcaagaaaacgatgggccgcaatgcttgccgctgcacgcacccaggtatcttcatcgatggggaaagttctcaccggcgtcaatccggcaaaaccgggcaatacgttagtttcgatcgactgctgtaccaccgtgccgagcagcccgccgaaggcacccgcctgatgggcaatgagtatcaggctggggtcgagaatctggatcagctgggcgatagccagtcccagcgccgtgcctgcacggtgcaggatgcggatagccgccgccgaaccgccggacgccagctgctccagctccgccagactgctcaggccaagattttcttcgcgcgccatctccatgatggcattcagcgaggcgatggtgtcgagacagccgcgcttgccgcagcggcacggtgtcccgtttagctccagcgtgcagtgggcaatctcccccgcgccgccgtgcagacctcggtgcagcctgccggcaataaaatgcgcgctgccaatgccagcgccgtggctgaccagcgtaaaggtgtcgaggtctcgcgcttgcccaaagcgtttttcactgaccgccaacgccttggcgtcattttcgataaacacctcaaggccggtagccgccgcgaccagacttgccagcggcacatcgcgccagcccaacagcgccgattgcacacaggttgactggttttcatcaataaaaccggagagcgtgacccccatgccaatgagtcttgcggcagcgtcagtgtgcccttccaacaagtcgggtaacgcgtgggcgatgttctgcgccagcgcctcaggctctcgagaaagcgtgaaaccggcgcgggctataatttcaccttgtaaattaattagcgccatcttcgccggcgtttgcagcagcgaaacgccgatgaaataagccccttcgggccgcagcatcagcctgacggatggccgcccctgccccggcccgttaacggtttctgactcatgcaaatagcccgcgtcgatcatctccctgaccacgccacctatggctgccttgctcatgccgcacacctgcgccagttcggtacggctcagccctgcggcagagttgatcgcccctaatatttgccgttgtagtgaactcagcattccgttttcgcgctctcatttttggctaatctgccttgacattaaacttataaaatgaatatatcaatgccaattagttcacaaaatttactaaataatgaaacataagcatttcatatgaaataaatacccagagattgtagaaaatgccacaaaggcaattttcgccattaccgcaacattggcagaggaaaatctatgaaaggtttcagaaccatcggctgtccgggacgtttaacgttgcttggctgtgcgctgctcggcgcactggcttccccgcgtactcagccacgttgacggtgatgcaaaacgaggcgccgcgcagcatggatccgggcaaccagaccgcaaccttcacggccacggtgttggatccgatgtacgaagggctgctgaaaatgtcgcccgcgctgaagctcgaaccggcgctcgcgacctcgtggagcagcgacgccagtgggctggtatggacctttacgctgcgcagcggcgtaacgtttcacgacggcacgccgtttaacgccgacgcagtcgtctccaactttgcccgccatctggacgtgaaacgcggtctggcggctagcggtcgtctgcgcacctttatcgacagcgtcaccaaggtcgatgaccgcacggtggtgttcaaactgaagaaaccctacccggcgtttctgaatctgctgaccaccggagcttgcctgatggtcagcccgaccgccgacaaggccggtacactggacagcaaagcggtaggcaccggcccctacaagatggtgcagtacaagaccggtgaatacgtgctggaagagaaaaatccgggctactggggcaagtcagacggccccgaagacatcaaatggacctggagttcggagtcttcggtcatgaatatggcgctgcaggcgggtgaagccgacgttatcaatcccgttccgccgcagttcgcccgcatgctgaaaaacaaccctaaattcgtattgcatgaaagcccaggggcgtcagtgttctgggtcgcgctgaatacccagttaaaaccgctggacgacgtgcgcgtccgccaggcgcttaacttcgcgaccgaccgcgatgggctggtgcgcgccatcatgtctggtttcgccacaccggccaactccccgctggcacccatcactcccggttatgacaaatcgcttaacccttacccactgaatatcgagaaagccaaggcactgctaaaagaggccgggtatgccaacggtttctcaatgtctatcgccgtacagggcgcagacgcgcgtattggtcaggtgctgcaaagcatgtgggccaaaattggcgtgaagcttgacgtgcgtcagatggaaagcggcgtctggaccaaagccgctttcgccgatccggccggtaaaaaagccgacggcaccggcgctattctggcctcctggtcttccggcgtcagcggggccgacttgcagctacgaccgctttattactcgggcagctttgcgccaaccggggccaacctcgggttcttcagcgatgccaaactcgacaagctacttgataccgcggcctctacgctggacgaaaacgcccgcaatcagctctacgtgcaggcccagcaggagattaacctacaggcgcctcaggtgctgctgtattaccagaacgatctttatgccaccggggccaacatctccaacgtctggatgatccccggtggaaacgtgatagtcaaagacgcccataaacagtaggaagcggcatgaaagcctatctagccaaaaaactgctggcctttccgatcattctgattggcgtatcgctgctgatttttgtgtcgatccgcgcactgccgggggatccggcgcgcatgatggctggccccgaggcgacgcaggaggccgtcgatcatatgcgtacgcgccttgggctggacctgccgctggtcacccagtatgcgcatttcgcccgcgacgtgctgcacggcaatctcgggctttcgctccagtcgcagcagccggtcacccaggagattggcgagcggctgccctacacgctggcgctggcggtgctggcctattttctggcgattgtgattggggttccggcgggcatgatgggggcgatttaccgcaaccgctggcccgattatggcgtgatgctgttggctattgcgggtgcgtcggtggcgaacttctggctggggctgatggcgatgaacaccttctcggtggagctcggctggctaccgctgctcggtgcatcgtcatggaaaagctacattctgccgtcggtcacgctggcggttttgccgatggcggtgatggcaaggatgacccgttcgagcatgctcgacgtgctttccgaggactatatccgcaccgcgcgggccaaagggctgtcggcgatgagcatctactgtagccatgcgtttcgcaatgcgcttatcccgattgtcaccattgtggcgctgaacttcggcagcctggtcggtggcgcggtggtcaccgagtcggtattcaactggccgggcattggccgactgttggtcgactcggtgcgctatcgcgattatccggtcattcagggcgtcgcgctggtcgcggtctgcggcgtggttatcatgaacctgctcggtgaactgctgatagccctgctcaacccgaaaataaggtttgaatgatgagcaccctaaccgcactctctgcgcgcaaaaagagccgaactgcccaggtgtttcgctggttatggcgtcatgctggcatcacctttggcggcgcaatcattgccgctatcgtcatcgccggactgcttgcaccctggataaccggccacgaccctacactcaggatctgctcaataccctgctttccccctcggctgaccatctgttcggcaccgacgactatggacgcgacatcttcgcccgggtgatttacggcgcgcgtatctcgattgtcgaggtggtgctgagcgtggggctggcgatgctgattggcatcccgctcggcgtcatttcggggatggccggtcgctacattgacctggtaattatgtgggtgatggacatgctgtttgcgtttcccggtatcgttctggcgattctggtggtcagcattctgggcggcggtctgattaatctgctgatcgctatttctttgtttgccattccggtttatgcacggctaagccgtaacctgacgctcggcctcaagcgcatggaatacgtagaggcagcgcaggcgctgggcctgtcgtggtatcgcatcgtggtgcactacattttgcgcaatgccgttgggcctatcatcgtgcagtcgacgctgaccgccggaaccgtcattctcgccgccgccagcctgtcatttctcggcctcggcgtgcagccgcccatgcctgaatggggtacaatgatgagtgatggtcgaaactttctcggcattaatatctatctctcgctgttcccgggtctggcaatcatgctgaccgtgctcggttttaacgtactgggcgatgggctgcgcgacttactggacaagcgttcatgatggtaaacacaggcactgcggttttttgtgccgatatcggcggttcatttatcaaatttggcctctcccgccagcagggcgaggttaccgtattagcgaaggtcgccaccccaacccagtcctgggacgagtttgtgctggcgatgcagatgctgctgaacgagcacggcgcagaggttgctgcggatgccccgttggccatctcgactgccggactggtttcgccacagtccggtgaggtaatggcgaccaatattccgagctttgccgggcacaatcttgccgccgaactcacgcaaatactcaaacgcaaagtcagcgtggcgaatgacgccgactgctttgcgctggccgaggcgcacgtcggcgaaggtctgggactgccgattgtagtcggcattattctcggcaccggcgtcggcggcgggctggtatttaacggacaactggtgcgcggccacggcggcgtcaccggtgaatggggtcatggggcgattacccgcaccgagctgctgctggacaacaaattggtcagagtgcctcgtctgctttgcggttgcggtcagagcggatgccttgacatgctcggcggcgcccgtggcatcgagcgcctgcatttcgagctgcaccagcaaacgctgaccagtcatcagattatcgagggctggcaggcgggaagctttcaggcggtgcagaccctcaacgcatggctggcgctggtaagcgaacctcttaccctgatggtcaacattctcggggcaacccgcgtggtggtcggcggcggacttgccagcgtcatcccgctgattgccgcgctcgaccagcgagtgcgtgagtctacgctgcacaagtatccgcagccgctggtggtccccggaaaattcgtgaatcagggcgggctggtcggtgcctcggttttaggccgtcagcgctgagtcaaaacgcatcgtcacacggctggccgaccttattcaacgcgttgattatccccacgcgcagctcggccagcgcccgctctttctcttcaatctgtaccagcttgcgttgcaggctggccttcttctgttcgacagaaaattggctgtcaacccagaccgcaagtacctcggcgatttcactgagcgtgaagcccaacatttttgcatgcttgatcatcttcagccgctgcaggtcaaccgccgaatagactttatagttgttgctgccgttaggctgtgaggcctgttcgagcagcccctgccgctcgtagtaacgtaccgtatcgcgcgggacgccagctttggcacacaactctccaatgcgcatcgttcagctctccgatgaaaggttaaaatggacttgaccgtagacctaagtccacggtttatcctgtttgcagcataacctcaaacaggaaaacggcatgaaatctttcaattattcagaaaaaacggcgctcattactggagcatcctcagggattgggctggaatttgccgaacagcttgccgctcgtggcgtgagtctcgttctggttgcgcggacccagaacaagctgcaagcgctggccaacaggctgacgcagcagcatggcgtgacaacgcgggtgattgcacaagatctcagcgccgtggacgccactgccaccatcatgggtcaactgcatgaagccaaaattttccccgacattctgatcaataacgccggttttgccacctacggcgtgttcgatgcgctttctctggaccgccaacgcgaagagattcaactcaactgcctgtcgccgattgaactgacccacgccctgctgcccgccatgctaaaacgcggcgacggcgctgttatcaacgtggcatccactgccgccatccagcccgatccctacatggcaatctatggcgcgaccaaagcctttttattgtcattctccgaggcgctgtgggccgagaaccgtcaacgcggcgtgcgtgtgctggcgctgtgtcccggcgcaacggatacggcatttttcgatgtagtgaacgctgaagaggcctcggtagggaaaaggatgaaggccgatgcggtggtcagtcaggcgctaaaggcgctggataaacagcgtaactacctgataaccggctgcaacaactggctgcttggccagctgcaaagatttgtgacccgtcggcgactgctgattatcgccgagggtatcttgaggcctaaggctcaacggtgaagggccactcttcgactcaagacagagtggctttcgacaggatcagttcaagtcgtaaaagcagtcggcgtccagcgtgacgtcggcgattttctgcaccgggccgcgcatattaaccataaagtctcccgagaaggagatagccagctgaccgcccggcatggtgacagtgacgcggtcatccaccaaccccagtttgcgcatcgcactggctgcggcacagctgctactgccagatgctagcgtgtaacccgctccgcgctcccagataccgatgctgatattttgacggtcgataacctcgacaaactgcacgttggtgcgttttgggaaaattgccagcgtttcgatttccgcgcccaattgatgaaccagggctaaatcgagtttttcgacgcgaataacgcagtgcggattgcccatcgagaccagcgtcgcgttcaagtcatgccccgcaaccaccagcggctggtcgagcatgtgctctccttcaacgtgtgcaggtagcgcagagggggtaaatttcgcctgccccatatcgacgatcacctgatgcgcgccttctgtcacctcacaggtcacctgcccacccaacgtattcaccaggaaaggctcatgaccgactctttttatatcaaacagatagcgcgcataaatacgcagaccgttgccgctcttctctgcttcggaaccatcgggattgatgatacgtacgcgcggcacgtcctcatcatcgatatcaatcagtaaaccgtcggagccgataccgtaattgcggtcgcaaattcggccgatctgttcgagagaaaattgtgcagccacgctttggttacaaaccagatagtcgttgcccaaaccgtgataacgatgaaagagagaggaatgcatagtcagctctgttgtgttcgtgaagaaataaatgaagcgtttttggtttctataaagaatacaccagcgttaactcgtgctgcatgaaaaaatggcgttttagaaatcgtttagcgtcgacagcacgcggagtatgagcggtttggtttcattctttctccagacagcgtggatagacacctcgagcgggaaccagggcagttcggcaatttccacgttggcagagcggatacgcgccagacttttttgtataaaggtgaaccccagcccggcctctacgcaggacagcgcggccaaagggccagtgacttcaagtcggatattcggggtaaaaccgctcaccgcacaggcgtgcagcagccgaatacgcgctgccgggtttaggccctcccggtcggcaatccagggctgcctgtcgagggtttcaggcgtcggcagcaataagcgcttgttaacgggcatcgctaacacaatgggttccgaaaaaacctttctctgctcgaattcatcgctttcttcgggaggcgtgtgcagcagtgcgagatctatcgttctgtcgcgtaggctttcaatttgctgcttagagcggaaggcatgcagatggatatcaacatccggtgaacaatcaagccgtgccagcgtctcaggcagaagcctggaatgaatcgccgcttcgacgtagccgatatcaagcctgccggcgagacctttgcccagatttttccctctgtccttcaacctgtcgtgatgctttaagaacgcccgaacctcgccaagaaaatcctttccttccgacgtcagccgcaagcgctttttctcccggtggaagagttcaacaccgagctcatcctcaagcagttgtatttgcctgctcaaaggcgaggaggagatgtgcagtttttctgcggcctgcccgatatgttcaagctcaccaacgacggcaaaagatcggagtattcttatatccacaacaatttaggtcccaagtgtgccaaaaaatattatagctgatactcgcgcttaacaccatgatgtactaccgccaacacattgaatttaatcaagttggtcagcgagaatttttcagtacgtccaatcagaaaaaattgcgcctgaaattgggaccgttcccattttagtcgctcataacgtaagggtgatgttagcaatgttaagtataaatgacattcgtgttgagtgtgggaaccaggaaggcccgagagccatcatgctttctccgatgatggcacagtgggacggcggcgctttctgccaacctcttctagattggctggccaatgctggctacagcgttgcagtctacgataccgttggcctgtgtaagggcacaaaagatctgcatgaagccaccgcagtctggggtgagtttctgctcgaacatgaacccaatatcgacttgctgataggcaggcttacggcggcgcaatcgctcagcatctcctcgccaacgagcttgcttatgtttccaaatttattggcatctcggcgccgacttattgcgacagtctgctgcgtgaaaaactaaatggggtgcttatcgatctgaacgaaatctctgcggaagcgggcctgaaaaaactcctttggtgcattcgcccagataccgatgacacctcccgcaagtcgaaggtcaagcccggcaggtactgttgaaagactggcgaccggcttaaagcagcttcaaagcgcagatgcacgtcatattatcgccgattatcagggcagcgccctctggatttatggcagtcattccagactcgttaatacagtcaacatcgttcctgctcagggtcgcagcgaccatcaaagcgtaaaactgcctcattgtggcatgcatcctttccgtgacgttccgcttgaggccattaaggccgtggaaacgtttttgcaggaggccatgtaatgaaaaaagttctcgtgcttcccggcgatggcgtgggtgccgaagtttgtcatgcagcgctgcccgtattcacgctgctgaatttaccgattaccctcgagtttgctcaaatcggctggcagtgctggcaacaaagtgcccagcccattccggcccagacgtgggaaaaaattacccagtctgacgccgtactgttgggtgcaataaccagcaaaggcaaacaggatgccgaagcagagttgaccccggcacttcagggacaaggccataaatacgtatcaccgttaatcgagatgcgtcaaaaactcgaactttttgccaatgtcaggccggtttacagcatcaaacctgggcaacgccccttccgctgcgtcgttttacgtgaaaataccgaggggctttactgtggtctggaccgtcgtggtattcccgaggagtatcgcagctgggttacgcacaccaacattgaccgttcagggcatcaagatgtcgccatgagcgtgcgaatcgtgacgcgctttggcatggcacgaatcatccgttatgcctttgaatacgccaaaaccaataactatccaagcgtcacttatgcggacaaacccaacgtgcttcgtgaaagcggccagtttgccagcgatattttttgggagattgcagcagagtacccggacattcacgccgaaattcacaacgcggatgccgttgcgctttggctggtacagcgacctgaacggttcggggttattgtcgccgaaaatatgtacggtgatattctttccgatctcgcagcaggcgtgatgggcggtctgggaatagcccctagcgccaacattggcgccgagacgccttattttgaacccgttcacggcagcgcgccgcgcatggcgaataggggtaaagcgaatcccgccgcgatgttcctcaccattggcctgatgcttgagcacttgggttttggcaacgaagcagaaaaagtcaaacgtgcggtcacctgggttatccagtctggcgatacgctcacctatgaccttggcggcaacgctacaacacagcaaatggccgataaaatccttgaatatatccaaaacgctgaaggcaatgagcagggcaatgtccttgctggcctggttgaagatttggcagaggcctgaaaatgagtcatgactttataacctattggcgagatagaatttcgtttctcgacgttcattatcacgtttctcctgacacctttattcgccggcataacgtaattacggcgggcgaaatctacaaaaatctcggcggtgccgtggttctcaaaaatcatctcggcgatagcgtttccatggccgaaacggcaaggctttgtgggctgccggtcatgggttcggtggtgctcaatcaggtggccggtgggccaacctggaggagcgttgaagagtccttgtgcaaaaggcaggccgaacacagcggaagaatgattattcatctgccgacggtaaccgccgtgcaaaacaaaaataaggttgatcggacgctggccaacgactattgcgccaaagcacgctcgcagggtgtttcaataagtgatgaaaacggcgcattacataaggacgtcatcgaaatcctgcacctggcgcgcgacaatccagtggttatttcgagcgggcatacctcccgcgcggaaacgctgacgcttatcgagatggcggaaagaatcggcgttcctcgcctgatgctcaaccaaccggccaatccgatgacaggcctgtcggcgcaggatctcgtcaatctctcaggcgcggactggctgtttatcgaacagaccgccctcacctatctgctcggctggcagacctgggaagactatagcgcgttctcagcgaagtgccgaacgttgtatacagttcggatcttggccagaccagccaaatcgatcttctgaatggtatgaccaaagcctgaagtggttcgaaaaatgaacctgtcagaggcacgtagaaatgccatctggctggacaatcccctgaaaatgctgagccctagctaaaatagccgcgtgttaatgccaataacggcggcaacacttatagagaataaatatgaaagaagtcataaggaatcgtttcctgctaatgtgcgccgtggtgatgatgctggtgctcagtctcttttcgagcgacattttcctgcccgcctgctgacattgtccgccaatttggtgtgaccccgagtcaggccaacagatgctgggacactttcttctcggtgtcgcactgatgcagctggtttatggtccactgtctgacagtctggggcgtaagaagctgctgattttcgggacgagcctgtttatccttgcgacctttgccatcatctacgccccaattttaaggatctgctggcccttcgtttggcgcaggccgttggcgcaagcgcgagtatcgtgctcgggcgcgcaattattggtgacctgtttagcaaagaggaagccggtaaaatcttcctgactcttttccccatcgtgggtatgtctccggctttggcaccgatgattggcgggcaaatcagcaatcttttggctggcatgcgtgcttcattttcgccgggctttttggcgtagtgctgctgtttctgacgctgaccgcggttcccgaaacgctccccagggaaaacgcaatccactgtccgccgttgatgtgatgcagggatatatcgccctgctgctgtcgcgccgcttctggcactatgcgttgatcccctgcattgcctatgccgtttttttatgcctatatcgccgagtctccttttttactcctaaagcaaggcgtatcaaataaagtcataggctttacctacctgagtctctcgctgacctatgtcacggcaacctcatcgcgcgctggacaatgtcaaaagggctaacgctggataaggcttggcgacgggttacctggtttttgtggcagcggcattgtgatgtttctgaccacccattttgcccctaatttctatatcggttccattaccgcgatatcaatcatgacattaggaaacggattttgcttcctttaggtactagcggcgcagtcaccgccgtaccccataatgccgttcagcctctggcctgatgggtgcgatgcagattggggtgccgccatcattgccggcattatgggccgctctcaggccataatccgcaaacctttgggatgatagtttttgtgctcgcgattgccggtttcttcattttccagaccacccgtcggctgagttatcgcgctgaccttaacaggcagctgtcctaaaaagtaattcagttcaaataatggccgcaaacgcggccttatataaacaataaaaatgtgaccgtaaggcactttaagatgatggcagcggctttaaactttctgattaatattctgagcgaatgatggtctttttaaacatttattttaatctttcaacccccagtttaagctgaaaatacgcattaacttttagacacgcgaaaacatcaatataaataaaaatcatacctccataacgattttatggcagacattgtgcttttcagcccctaacgtggttgaacggacacaatattcatacagcacaagatattgtttaatatataaaattatttttataagccgtcactctctgcatggatgcatcgatataaaaacgagaatattttttgaaagttttaatccgatcacatattaataaaaaaaatagagagcgtaccccatgagtcagaacagtatgtcgatgtaaaagcctggatagattctcgatctatttcgggttatcaatggctgatttatcactgtgtttcatcattattatgtttgacggctatgacgccgcagtgatgggctttattgcaccggcactcatggatgattggggtatgggtcgaggtgcaatgggccaatctcggcgcggccatgtttgcgtcgccatcggcgcactggtgccggtccttatgccgaccgttcggaagaaaacgcattctgctgatttccatcctgtgctttgcggtgtttagcatgatgagcaccttcgctcgcacgccgatggaaatgggtattctccgcttcctgaccggcttaggtctgggtgccgtcatgcctaataccgtcacgctggttccgaatacatgccggaacgccgcccgcagcctgatgataaccgtgatgtacagcggctttaacatcggctccggactcggtgggtttattgcagcaggctgctgcgcactttggctggaaatcggtgctgttcctcggcggtatgtgccgctcgttatgctgctgtgctgctgtggatcctgctgaatctgcgattacatggtagtgcgcaacgttgccaaagagaagattgaaaaagtactgcgtcgtgcaggcgggtattctcaagcgaaaccaaatttgttcttaaagcgcccgttatccagcagaaagccaaggtgttccagctgttcactcaaggctacgccgaaaggcacgctgtgctgtggttaacctattttatgggcctgttcgttatctatctgctgaacggctggctaccaacgattatgcgtaacagtgggttcacatggagcgtgccgctatcgtcgccggtcttttccagctcggcggcacctttggtggcctgatggtcgcgggactgatggaccgtttcaaagcgcgtcgtcattgccctgttctatctcatcggcatgacctgcctgctgtcgcagggcatcggtaactttggtgccaacacgctggcggtcttggtgttctttagcggcgtatgtattaacggcgcacagactggattgcaggctttctctccggcattttatccgaccgagatgcgtgcaaccggcgtttgctggatgcacggcgtaggccgcaccggggcgattatcagctcgtccaccggcggtattttgcttggcctgttctcgggtcaaaacgtgattttcctggttctggccgtcccggcgctgttggctggcctgagtattttgatgcaccgtgcggcgcatccggtcgaaatgatcaaaggtatcgaccttaatgatattccggagctgtcacgcaccatgaatgttcgttaatctttgataaaagattcattgattgaaatttttgaaggaaaattccttctacccttttaactgatgcagtagaggcaaacagtatggctagaattatcggcggattggcggtatctcataccccaaccattggttttgcggttgaccacaacaagcaaaatgaaagcgcttggtcgcctatctttgaaagctttgctcccatgcaaaaatggctggacgagaaaaaccagacgtactgatctatgtgtttaacgaccatgtcacctctttcttcttcgatcactattctgccttcacgctgggcattgatgatagctatgaagtggcggacgaaggcggtggccgcgcgatattcctgcgtaaaaggccacgccgcactgtcgcagcacatcggtgcaagcctgatggccgatgagttcgatatgtcattctttatggacaaaccgctggatcacggcctgttctctccgctgtcggcgctaatgccgcacaaaacggatggccgacgcagattgttcccctacagattggcgtgttgcagttccctattccgaccgcgcgctgctataagctgggccaggcactgcgccgcgcggtagaaagcttcccggaagacctgaaagtggcaatcgttgccaccggcggcgtatctcaccaggttcacggcgagcgttgcggatttaacaatccagagtggacgagcagtttgttgacatgctggttaacgatccggaacgtctgaccgaaatgaccatcgccgaatacgcgacgctgagcggcatggaaggttcggaagagatcatgtggttggtcatgcgtggcactgtcccaacgtcgagaaactgcaccatgcgtactatctgccgtcgatgacggggattgcaaccctggtgctcgagaacaaatctcgcgaagcccgtcgagtgccagcgtcagcgcgacaaaattgccctgcaaatggccggcgttgagaagcttgaaggcacctatccgtttacccaggcgcgtagcctgaaagcgttacgtatcaaccgtttcctgcatcgtctgattcagcctgcgtggcgtgagcgcttcctgagcgaacagcaggcgatgtttgatgaaaacaaactgacaacgatgaacaatcgatgatccgcagcctcgactggtgttcaatgattcagtacggtgtcagcttcttcctgctggagaaactgggtgcagtggtcggcgtatctaacctgcacatttactctgctatgcgcggccagacgctggaagagttccagaaaacacgtaaccagcaggttctttattctgttggggaaagccaaggcatgagtattttcgaccagcctaaaatagacacgcaccaccacgtttttgatccgatcaattttccctatattgcggatacggcttatcgcccagaggggcatgagattggtacggtggaatattatcagtcggtgatgcaggcctataacatccgtcattcgctgatagtggggccaacttccggctataacaccgacagtcgctgtctgctggacgcccttgaaaaaggcaatggccgttttcgcggtattgcggtggtgccttttgacagcagccttgaaaggctagccgaattgaaacaggccggcgtcgtcggtatcgcacttaatgtcgcgatgctcggagtcgatccttttatcgccttcgacgatatgatgggcaaacttgccgagctcaacatgtttgccgccattcaggttcaggatgaccagcttttggcgttgatgcccatgctggcgcagcaaaccaaactgctgtttgaccactctggtcgccctgatgtgagcgcaggtttgcagcaaccggccttccagtcgctgctctcgctcggcgacagcggcc
